United States Patent Application Publication US 2007/0055448 A1 - sequence listing, part 2

SEQ ID NO: 3355 - DNA, 13894 bp, Rattus norvegicus
  Genbank Accession No. U68562
ctttgggtcacccaggaactgtatgaagttgcaattgagaaaatgcctttattagattggcccacaggagagctgatggtacagaatctgaatgatggatgtaggaagcatctctgggtcatgccacccctgggtaggtggcagtgggctgtgtaagaaagcaggctgagaagggtgcaagctgtaacagcctaggtccatgctctttgctttagcccctgcccatggtttcctgtaagtttccttgaagttgagataaactttcttctcagagtagctcttgctcagcagttatcacaggaatagaatataaactaagacagtacctaagtgtaagtccccattcatctatgtaataatgccaaattcatcctgaaagatcatttacctagaaatccattatttctcataactctttaactctgtagcttacttgaaggaaaagcaccttaaattaccagactgtccactcatttatattatttatttggaaatgtttgtaacagtacagtgaaactaaatttcagagacaatggctgtcagtttaggcatcatccgtttattataaaagggaggcatggaaattatttacatgatgaaatagttcagaatatcagtggaatgggcagcttcatgtgacaccatttcaacagtgatttcagtcgacatactttccaagaatgtcgccatctctaaataagaagtaatcctgtgaataaagagaccactgattaagatagtaataacaaatataaactgattttttttttggttcttttttttttttttcggagctggggaccgaacccagggccttgcacttcctaggcaagccctctaccactgagctaaatccccagcccctaaactgattttaaatcattagctttacttaccttgtcgtctagtactactttggtgcctccgtgttctgggagaagaactttatctccaactttcacactgacaggctgaatctctccaccctgatgaaaacagacacttgttagcaaagatgtatgtcttgttcactagatacacattaaagtttttgtttcagtatgtacaccaggagcctcctgcctcaggtttgtgttaattataggcattaatcacattaaaactgtaacttttaagtcactaaatttgtaaaagtgctcaaaccagtatctggcaggtacctaattagtggttaagcaatatagaccttacctacattaaatgtagaccttcataatatagcatcactgtagttactatatgacagagatgccttcagtgggcagctaaggttggctaactttttactgttaaatattaacacaccgtaagaccaagggaagggaagtaaagcaggtacttgttacactagacagcaaatggtcatgtatgacttcgaacaaatcgaaaaaattggcattacttttctccatttaatatacatttattgacttaatgtccttgttgtcaagacacagacttggtcagagactgaaggagaatgtccactcccccatactctagcggtttagttaagtgaagaacacccagagtagttcacctcctttctcaagtaggccaactaaaactcgaaatggtgtaggatgatttcagtgtctgggctaagccaacagtcaggctcctccacccatcaccgcacccttgcttttggggaacgggagtggggtgatggggtctatgtaaaaactgactggccattaattctggatccccctcactcagcactgtacctgtgctagaattagttttgtgccttattaaatacctcctccttcaattctgaaaagacccctgggtttatctacttgtatgactctttctgtctatttaaaatttgaagagtaggctacaaaataactacagaggtatttctttttttttttcagagctggggaccgaacccagggccttgcgcttgctaggcaaggcctctaccactgagctaaatccccaacccactacagaggtatttcattttgtgaggttttgttttactttgagatatggtctcgtcctgtacctcctgttggcctacaaggctctataatccacttgccttggcctccaaagaacctgggttagaggcatgaggcactatcaaggcaggcactttttaatctgtagtgtggggcactgctgaattagctcagtgggtaaagagacttgctatcaaagtatgggaacccaagttgccatcccaacactatagtaaaaaggatgtaacccccaacatgctcaggccagaaaccagactagttcaacacgactttaccccaaaagagtaaggtggagatggccctgcaacacatcatacagacatgtgcacatacagtcataccactcaaataccctctgcctttttacagtccctgtcattccttagaaatataaaacattctaaaattgttttcctgaatgcgaggttcttcgtgaattgaaatctaacttgaaattacttccaaaaaaaccttgccatttttaattaactttttaattaacaaaccaattcctcctccttcccacatcacataaaattctgtaccactctaggagctccgggttacacctttcctttcccgcctgatcccacagccacgaccgttgcttgcaatacttttccttgagacttttctggaagcataatgccacctttggtcacagtttcagcggcactcctttcaaccaatactctgtcaaatagcggaagaaacttcctaaaagcttgtccagcctgtggagagaaatgtgttcaaacagacagtaattaagttcgaagtgtcaggagacgagttaattaaataccactgcaaaccttaacattaatagtcgaaagccttccaaaatgaacagaaaacttaagtgtatctttagaatatagcccttcaatgttcactccatatagccagttgattttcatttccttgtctgttgtgagtgtgtgggggccgggggtcttcattcgctcatcagcaatcgcaaccttggtctttctccaaggtcaaatatttttcctttctcagatttttttttcaaactcgagtaacaggggagtggtgtcaatttttaagcccgatcttactctttctccaacataggactcattcacctaggctgtgccagggcaggtgggcttctgagtatgtacccgggcgcccgccccctgctccagacgcctgccgcacacgtgcgtgcagaaaagccgtggtggagaaagggtcggataggcctcgcttctgtagagcaacggaggtcgctggacactgagtgacccctgtcctgtcctgctagtcccaaagcgcacatggatccgtcggcctgccagccacgagcactcaccatgacttacgccgccgcagctccggactctgcactcggactcctgctgcaaggagactcccgtgggccggctcaggacacgtgaaaagacagcgcagcgcgcaggcgcactcagccccttagcgtgagagaaggcggccactccagcgcgcgcgccgattggtggccaggactccgcgcaggcggccgatgcgggtagccggaggcggaagaaaaggggagcactttctaggcttttccaggtcggccgctgaggtgaaagaacaagcccctcccggaaatgacgccacttgacctttcacccacgaaaagcgcggggccttccggaaggttctagaaccgagcgcggcccaggaaccagtgtacggcggcgggagagtgctgaggccacggggctgaggccgctcaggtaaggagggcggggccgcgcgcgtcgcatgcagattgcagggccggggcgtgggagaagtggggcgcgcgcgcgcgcacgcggggcgcggggcggggccggggagggaggggactcgggctcattgcggtgcgcgcccagtgctgggtccctcactcgccgcagacggcctgcctcgcctcgtgctcttccgccgccgccccgcaggtacgcggcctcggcgtgcacggcggcccggtgctcgtgggcctgcttgcagcgcggaccgagcacggagggctggggataagtctgtcagcgacgcgcaggctcggttcacttgttcaggcccagtagggccatactgctttcatcacgtgcggcgggcaccacgcgacctaggctaagcgcgggagcaagggcgggctagggtgggagcaacttgggccctgtggttccatctgcgcctggcgactgtagggctctatcggagggtggtcgcggtcctctagtcgctgtggccgcggtgatccggcgccttcactttgaccttgctcggggctcctggtcgagaagacacgtggggctcggcgcgtgcgctgagctagggcccttttctccggccttgcttgctgctgtgctactgtagctccgggtggatgctggcgggcacactctccttagagggttttgcaccgtcattagtacttctgtgattctctaggcacttgcatttagaacctgcctgcttacaccaactttttttttcagacacttttcggagtggatctgcttccaaggccgttttggcagtgaaagattaactcgagagggcaggagggggtggccatggggaggtggtttcgtgtgctttgtgctagtgctgtaggtcaggcatgggggcagcctccatgatcagttggttaacagattatgtcctgaatctgcagcgccgttagcagagaacagcagaactccaatctagccaccatattttgaagcaccgttggacaagtttgtagtgatactttttttctttccccagaaatgcttcgactacccacagtccttcgccagatgagaccagtgtctcgggcactggctcctcatctcactcgggcctatgccaaagatgtaaaatttggtgcggatgctcgagccttaatgcttcaaggtgtagaccttttagccgatgctgtagctgttacaatggggccaaaggtaccagtatacttatgtcgtgttaaagaatagtgttctgtagctgcaagacagcattttgtaatcgagttttgtgagtatctgatttgcatgtggtacaacttagtggtttggggggtgttatttaggtttgttagttggtcattctacgacggtgtccttactgctgcttcagtcgatttgggagacttctgtgcgttgtgatgtaatagtaacagctcaaggaagattttcaaaccagagtcatgactgtgtgcatgcttgcattaaattttggatcccatcccagtagttagagggtatatagaggggaaagtacaactccactctaataactcaagtgcatagctgtaatgtgagcgttcactgaacgctgaaatttccaacataaaaggcaaatgcactagtgtagaatcattactttaaaggtgtcgtatttttatatgcattttattctgcctgcatttatgtctctgccagggtgccaaggttctgggaactgacttccccctttggaagaggagcctgtactattaccaccaagcctgtctttacttaactttatgagctttgttgtttgggtcttttgtttgttttattcaagatgcatttctctggtagcctaggctgtcctggaactcaaagagatcatctacctgcttctgcaacacattgtcagactctttttacttgccctttgggaaaaactttgtggtctcccattcatctctacattgtacatacctcatgtttctgcaattatcacattgcaaagatttgtctagttttgggtttttgagtctcactagtttagtctggcttctaacgcccgtggcaaggctatcctcacatctccagcgtaggaattcagtattctactcacccagtgtgtttttattatgacaaggtctctaaccatagctggccaagtcagccttgaacttgagcactgctaagatcagaggctgggatcacacatttaagtggctgaatagggagctatagtactttgaggacatcattggatacagtgaggtcattttaaattgatactagactgaactgcataatcccagcattcaggaggctcaggcaggtggatctgaaagccatggatctaaagctataagagaaatcctgtcttgaaaaacaaaacaacaaaaagccctgcatctttaagtactgtttacatagctcaagacagaatagaagcttggttcaaatccaaaagttgccaataccgtcgttgccatatttgaagtttttattgagtgaaccagaagagcccatatttatcttactggctgatatttagtgaatgaattttaaagcaaaacatgtttttgataagcagggcattagtgagtggttcttgcctctggtcccagccttcaggaggcagaggcaagtagatctttgtgctttgtgagtttgaggacagccatggctgcacacagaagaaccctgtctcagaaaacaaagccagttcatagccaaactcaagtacaaacgatgtgaagaatgtcctgggatctgtgttttcttgttttataggtagcatctgttagttccagggaattcctgttgtgcctcagtcaaagttagactccagggcacatgagtagtgttcattttgtctatacacctaagatggttgattaacttggctttgaggttcgtgttgcaggattgttaacaatgacaacttcaaggattatctttaagggttgatattttttttttttgtcactatagggaagaacagtgattattgaacagagttggggaagtcccaaagtaacaaaagatggggtcactgttgcaaagtcaattgatttaaaggataaatacaaaaatatcggagctaagcttgttcaggatgttgccaataacacaaatgaagaggctggggatggcaccaccactgccactgttctggcaccgtctattgccaaggagggctttgagaagatcagcaaaggggctaatccagtggaaatccggagaggtaagagtttgtccttgatcctatgctgtaaagaattctacatcttcatctttgtcctttttgttgtagagtttgtgtatgttcttggtagagttgcccttccttacttatgtggatttccaagattgaactgaggccttcaggcttgtgggtccagtacttttactccctagacctatcttccacaccttgttttttaacttatttaatggaagtgaaaatacagggctttcggtatatccctggctgtcctggacacgcttggtaactttgtagacctggctagttagcttcaaatagatctgactgcttctcctttctgagtgctggggttaaatgtgggcactaccacccatgcccaaggccctgtagtattacttaacctttgatccatcccgtgagccctaagtagtgagaattctgaaactatcttttcttgttttgattaggtctcctttttagccttccctgacatggttccctatataatccatgcaggtctcaaatttttagccattctgtctcagtctcttgggtcctcggattacatgtgtgagccaccatgcaacatctaggtcaagcttttcaaaatgttggttttcagtctaaatgattgattgaatgcatactgttgtttggtgcagttgggagagtgctgacatgagaggttgcatgtgatcgttagaaggaatctgtaattcttagcggggaccatgataagcattgtagtaacatacattcttgaactaggtgtgatgttggctgttgatgctgtaattgctgaacttaagaaacaatctaaacctgtgacaacccctgaagaaattgctcaggtaaggattttatttcgtgttgaaaagaataattttgatcttttggttccaagaacaggatttgggtttgtctttgtagccatgactatcctggaattaaacgtatagatcaggctgaccttgaactcaaattcctctgcttccaaagtgcttgccccatcactgttagatcttactctttttagttttacggtgctgtaaataaaatttgtgttatttgtgaaaatattcttaggtgatatcaatgtaccctgtactatatgggttcaaacctagtccttgaagcatagttaacaagtgttttttatatgtatgtgcctgggtgttgtgtgggttgcaccatatgcatgcatgaacccataagaagaattaagagacagttgccagccactctggtgtaggtgctggcccgaacagtaagtcatcttaaccactgaggcatctctccacctctttagttttagtttattcttaatgtgtcagataatggaggaatgagggtgtagctccatttaaaactaacaactggccctcttgctctcttccttgctctgtccccttgctcctttccccttctctccagtcccctccccactccccacgtgctcatggtcggctctacctttcttctgcctttttctgtctttactacccatcctcatgccctaaataatcaattctattttaaaaaaaaaactattaactgtaaaataatcagtttagagtgtcaaaggagaagaaagttgaaaatattaatcttaccatttgattttgaagtaaattggttatttcaggttgctacaatttctgcaaacggagacaaagacattgggaacatcatttctgatgcaatgaagaaggttggaagaaagggtgtcatcacagtgaaggcaagcatgggatttgatatgttttgataatatcttcaatggggtgtctgtaacctattttccaaataaaaacttgaatctcttgtttgtgtcagtacaattcattcctttgtcttaacatctgtattgagtatatgctcactattagtctgaatatttgccccctacaatgagttcatctaacttaaataattagctctctgctagctgtaaatagaatggagcctctaatcctggctgtctgggaactctaggcttcaaccttagagagatggcatccctctgtcatctcttctttctgaagattaaaaaaggcatgggttcctgagctcaactttagttagtggcttgaatttttgtgggagtgcagttagaggacactgcagcatttccatgttgagtcccttatgcctgtgtcatctcttgctaatttggtatgtaatttcaaatgttggcttatgtttttgagacagggtctcattgtgtagtcatgtttttgagacagggtctcactgtatagatagtccaaattaggcttgtgtttcttttaagagattttttctatctatgagtgtttgtttgcacatgtatgtgcaccttggagtccagaagaaacagcagaatcctaggaactgagttgagaaccatcatgtaggtgcacaaaacccaattttattcaagaaaagcaaatggggctggaaagctggatggctcagtgattaagaacactggttgctcttccagagaccatgagttcaatctctagcaaccacatggtggctcacagcaacctaaaacgggatatagtgccctggtctggcacacaggtgtatatgctgataagagtatgtaaaatatataaaataagtatatctttagaaaaaaaagagaatagcaaatgttcttaacccttgagccatctttaggtttagctgaccaagttttgtttctttagtttaaataggatggaaaaaccctgaatgatgagctagaaattattgaaggcatgaagtttgatagaggatatatttccccatattttattaacacatcaaaaggtaagagcccatccacaagtgaaagtcgtcacaatatgctctaagctgctaacttactgtcagctgtgggtaatgggtatggctgatgcaataagtaaaaactgtgatgtttaaacattaatggtttggtaaatgaagaagaacatgagttactggtctcattgtggaagtaaattgttttactgctcattgtatttataggtcaaaaatgtgaattccaagatgcctatgttttgttgagtgaaaagaaaatttctagtgttcagtccattgtacctgctcttgaaattgccaatgctcaccggaagcccttggtcataattgctgaagatgttgatggagaagctcttagcacactggttttgaacaggtaatagataaattggattgggtttatatatttttagatagaaggtaatttctttcttttgcttttttgaaattccacattttgcttgtgtgtctcaaagctgtagtatatatgatgtagtgctctatgcattatgagtctatctctagctggtctcaaatgcacataattcttgagcctgtgcctcccacagcttcccagagaaaactatacatatgtcttttttttttttgtaagatttattatatataattacacaagggagcatcagatcttattacagatggttgtgagccaccatgtggttgctgggatttgaactcaggacctctggaagagcagtcagttttctcaaccaactgagccatctctccagctctacatatgtctttttttctttttttttctttctctccttttctctcctttttttcggagctggggattgaacccagggccttgcacttgctaggcaagtgctctaccactgagataaatccccaacccctcacacatgtctttttaacactggtgtgcttagcactaatgcccaactgtgtctggcaatgtaagagcagcatttctttaagaagggaatcaggttgaaacaaatttagatgagtagaggtccccatctcatcttttttaagaccagaagttgaaggaaaagagtagggtctgtacagtcatgtagacctagaacttaccagggactaaactagatgctttttcccaattccccctttggtttacatcttacgcagttaaatgtctttacaggctaaaagttggtcttcaggttgtagcagtcaaagctccagggtttggggacaacaggaagaaccagcttaaagatatggctatcgctactggtggtgcggtaagtaaaccttgtcatactgctttgctcagtgttgtttatgcttccagatcgtaaatacaatgtatacttcacaatagatgggctgtttctttctattggatatttggaacacgggttggattaaggtctcacttctaacttactgagcctggcctgagaatggacatgattaaaagttcttctcaaaatttaaaactaatttgtgtaagtgattttatttagactttgttctgatataccagtggaaaaatagcatttctttctctggatttttaagctttatgtatatgggtgtttgtctgcatgttttgtatgatgtatacataccagaaggcattttatccagttccatagcactacagttatagacagttgtaagctgccatatggatgctgggatttgaactcaggacacctgaaagagtagaatagctctccagtgcttgtgactgctgagacatctcactagccctgaaaagctgtttttcacaaaaatatttgtgactatagtaataaacctagtataatggaagccactaacagcacattgtttttataggtgtttggagaagagggtttgaatctaaatcttgaagatgttcaagctcatgatttaggaaaagttggagaggtcatcgtcaccaaagatgatgccatgcttttgaaaggaaaaggtgacaaagctcacattgaaaaacgtattcaagaaatcactgagcagctagacatcacaactagtgaatatgagaaggaaaagctgaacgagcgacttgctaaactctcagatggagtagctgtgttgaaggtaagactgacttgcaggtaaacattttaggctgagtctggtgatagtggttctttagtatttaccaatagtaactaagtgacctttccccaaatctttagtttttgttgctcgtttgttttggtttttgcatgtgctataaccaactttccatggggcacatgtaaagggacaactttcagcagttggtcatctacctttgcagtgatttttagaagcaagcaagccctttgacccacttgggtcatatccttaggccttctgagtcatcaataggcatctatcccctactggtattatgcatgagaccgaaaccattcttgtgctgtgtcatgcaaacagtctatcactgcccagtttcccagcttccttttctctttttctctgtgtagccctgactgtctcggaactcactctgttaactctgtagacaggattttcagtcctagaactcacttagtagaccaagctagctttgaactgaaaatcgctgcctttgcctcccaagtgctgggattaaaggggtgtgcacttctgcttggctagcatcctattctcacagggcagtacagcttgtgttgtaggaagttttgatagggggatacattataacctattactctagaattgcttccttctttgtttttgttttgaactctgctgtcacccaggcaggcctccgttggtataacccacctgccttaccctctcaagtgctggggtcgttactatgacactatacccagctcaggtctgccatccaggtggcttcaagtaatcattgactgggaagggtcggtactacctggaattttttatttaatctttaggttggagggacaagtgatgttgaagtgaatgagaagaaagacagagttacagatgctctcaatgctacaagagcagctgttgaagaaggcattgttctaggagggggctgtgctctacttcggtgcatcccagccttggattcattaaagcctgctaatgaagatcagaagataggtaaagattctttcaaatgagtttgtggccagagaggtaattagcaatgcaccacactttacaggggattgtttcacctatggtaggattggatgtctgattgcttactaaacttttatctttataattattttatgtgtgtgtgggagtgcattttgctctcatgtctcgtgtgctgtgtgtttgcagtattctgaggggctggaaagatggctcagtggttaagagcactgactgctcttccagaggtcctgagttcaattcccagcaaccacatggtggttcacagccatctgtgatgagatctgatgccctcttgtgtgtgtctgaagacagctgtagtgttgttatatataataagtaaatttgaaaaaaaaagaaatgcagtattctgagggccagatggggtcatcagatagcttggaactggagttacattggtgctaaggattaaaccaggtcctctgaaaaagaaaccattaaccattgagccatctttggttccccaaaaagggaaaacaaaagtaagttcatgaaaatgtgtttgctttgtaggtatagaaattattaaaagagcacttaaaattcctgcaatgacgattgctaagaatgcaggtgttgaaggatctttgatagttgaaaaaattctgcagagttcctcagaggttggctatgatgccatgcttggagattttgtgaacatggtggaaaagggaatcattgatccaacaaaggtaaataaatcagcatttctaaacaatgaatgacttgctctctggtgtatggttttctttaatttttttctttttttcggagctggggaccgaacccggggccttgcctagcaagcgctctaccactgagctaaatccccaacccctttctttaatttttaattgttttactaaatttttttctaggttgtaagaactgctttactggatgctgctggggtggcctccctgctaactacagccgaagctgtagtgacagaaattcctaaagaagagaaggaccctggaatgggtgcaatgggtggaatgggagggggtatgggaggtggcatgttctaactc

SEQ ID NO: 3356 - DNA, 3609 bp, Rattus norvegicus
  Genbank Accession No. U70050
ggcgcctgctgtgacggcgacggccggacgacgcgcgcggggggctgcggccgcgacgagtgcgacacgtacgtgcgcgtgtgccttaaggagtaccaggccaaggtgacgcccacggggccctgcagctacggctacggcgccacgcccgtgctgggtagcaactccttctacctgccgccggcgggcgctgcgggagaccgagcgcgcgcgcggtctcggaccggcggccaccaggacccgggcctcgtcgtcattccctttcagttcgcctggccgcgttctttcaccctcatcgtggaggcctgggattgggacaatgacaccacaccagatgaggagctgctgattgagcgggtgtcccatgctggcatgatcaaccctgaggaccgctggaagagcctgcacttcagcggccacgtggcacacctggagctgcagatccgagtgcgctgtgacgagaactactacagtgccacctgcaacaagttctgccggccccggaacgacttcttcggccactacacctgtgaccagtacggcaacaaggcctgcatggatggctggatgggcaaggagtgcaaagaagccgtgtgtaaacaaggatgtaatttgctccacgggggatgcactgtgcctggggagtgcaggtgcagctatggctggcagggcaagttctgtgatgaatgtgtcccctaccctggctgcgtgcatggcagctgtgtggagccctggcactgtgactgtgagaccaactggggtggcctgctctgtgacaaagacctgaactactgtggcagccaccacccctgtgtcaatggaggcacctgtatcaacgccgagcctgaccaatacctctgcgcctgcccagatggctacttgggcaagaactgcgaacgggctgagcacgcctgcgcctccaacccgtgtgccaacgggggctcttgccacgaagtgctgtctggctttgaatgccactgtccgtcgggatggagtggacccacctgtgcgcttgacatcgatgagtgtgcctctaatccgtgtgcggcgggtggcacctgcgtggatcaggtggacggcttcgagtgcatctgcccggagcagtgggtgggggctacctgccagctggacgccaatgagtgtgaagggaaaccgtgccttaatgctttttcttgcaaaaacctgattggcggctattactgtgattgcctcccgggctggaagggcgccaactgccacatcaatatcaacgattgccatgggcagtgtcagcatgggggcacctgcaaggacctggtaaatgggtaccagtgcgtatgcccacggggcttcggaggtcgtcactgcgaactagagtactacaagtgtgccagcagcccctgccgtcggggtggcatctgtgaggacctggtggatggcttccgctgccactgcccacggggcctctctggtccgctctgtgaggtggacgtggatctctggtgcgaaccaaacccctgcctcaacggtgctcgctgctacaaccttgaggatgactactactgcgcctgcccagaagactttggcggcaagaactgctctgtgcccagggagacatgccctggtggggcctgtagagtgatcgatggctgtgggttcgaggcaggatccagggcgcatggtgctgcgccctccggcgtgtgcggtcctcacgggcactgtgtcagcctgcctgggggaaacttctcctgcatctgtgacagcggcttcacgggcacctactgccatgagaacatcgacgactgcatgggtcagccctgccgcaacgggggcacgtgcattgatgaagtggactccttcgcgtgcttctgccccagtggctgggaaggagagctctgtgacatcaatcccaacgactgcctccccgacccctgccacagccgcggccgctgctatgacctggtcaatgacttctactgtgtctgcgatgatggctggaaggacaagacctgccactcacgcgagttccagtgtgacgcctacacctgcagcaacggtggcacatgctatgacagcggcgacaccttccgctgcgcgtgccccccaggctggaagggcagcacctgcacgatcgccaagaacagcagctgcgtgcccaatccctgtgtgaatggaggcacctgtgtgggcagtggagactctttctcctgcatctgccgggatggctgggagggccgcacctgcacacacaacaccaatgactgcaaccctctgccctgctacaacggaggcatctgtgtggatggcgtcaactggttccgctgcgagtgtgcacctggctttgcgggtcctgactgccgtatcaacatcgatgagtgccagtcctcaccctgtgcctacggagccacgtgtgtagatgagatcaatgggtaccgctgcagctgcccaccaggacgttccggccccagatgccaggaagtggtcatattcacgaggccctgctggtcccggggcgtgtccttcccacatgggagttcctgggtagaagactgcaacagctgccgctgcctggatggccaccgggactgcagcaaggtgtggtgtggttggaagccttgtctgctgtcccctcagcccagtgctctgagtgcccagtgcccaccagggcagcagtgccgggagaaggccatgggtcagtgtctgcagcccccctgtgagaactggggggagtgtacagcagaggatcctctgccccccagcaccccctgtctgccacggaccactcatttggacaacaactgtgctcgcctcacactgcactttaaccgtgaccaagtgcctcagggcaccaccgtgggcgccatctgctctggaatccgagccctgcccgccacgagggcggcggcacgagaccgcctcctcctgctgctctgtgaccgcgcatcctcaggggccagtgccgtggaggtggctgtgtctttcagccctgcaagggacctgcccgacagcagcctgatccagagcacagcccatgccatcgtggctgccatcacccagagaggaaacagctcactgctgctggctgtcaccgaggtcaaggtggaaacagttgttatgggtggctcttccacaggtctgttggtacctgtgctgtgtagcgtgttcagtgtgctgtggcttgcctgtatggttatctgcgtgtggtggacacggaagcgcaggaaagaacgtgagaggagccggctaccacgggacgagagcgccaacaaccagtgggctccgctcaatcccatccgcaaccccattgagcggccaggcagcagtggtctgggaaccgggggccacaaggacgtactctaccagtgcaagaacttcacaccgccgccccgcagggcaggcgaggcactgcctgggccggccagccacggggctggtggggaggacgaggaggatgaggagctgagccgcggagatgggagactctccagaagcagagaagttcctctcacacaaattcaccaaagaccccagctgctccctgggaaggccagcctgctggctccggggcccaaagtggacaaccgcgccgtcagaagcaccaaggatgtgcgctgtgctggcagggagtag

SEQ ID NO: 3357 - DNA, 206 bp, Rattus norvegicus
  Genbank Accession No. U70270
cccctccgctccagactccaagctcctgctcccagcctactgacctagctctccccagcctgctctgtgatattgtcacatatgctgacctcctctcttctgcagattcctacacacacaacaacgtgtgagggaggaagaagaaagatgttttggggagtgactttctttttagatactgtacagtaagttggtcagaataaaag

SEQ ID NO: 3358 - DNA, 6471 bp, Rattus norvegicus
  Genbank Accession No. U70476
gacgacttggccgccaggcaccgatcctccccggtgagaaggtccacgaatcttactgcagacagatttgctcagcgcgatgggctgcaaaaacctgttgagcctgggtcagcagatgctgcgccggaaagtggtggactgcagccgggaggagagccggctgtcccgctgcctcaacacctatgatctggtagctcttggggtgggcagcaccttgggcgctggtgtctacgtcctagccggtgcagtggcccgtgagaatgctggtcctgccatcgtcatctccttcctgatcgctgctcttgcctcagtgctggccggcctgtgctatggcgagtttggtgcccgtgtccccaagacgggctcagcctacctctacagctatgtgacagtgggggagctctgggccttcatcactggctggaacctgattctctcctacatcatcggtacatccagcgtggcaagagcctggagtgcaacttttgacgagctgataggcaaacccatcggagagttctcgcgtcaacacatggccctgaacgcccctggggtgctggcccaaaccccggatatatttgctgtgattataattatcatcctgacaggactgttaactctcggtgtgaaagaatcagccatggtcaacaaaatcttcacctgtatcaatgtcctggtcttgtgcttcatcatggtgtcgggattcgtgaaaggctccattgagaactggcagctcacggagaataaatccagtcctctctgtgggaacaatgacacaaacgtgaaatacggtgagggagggttcatgccctttggattctctggtgtcctgtcaggggcagcgacctgcttttatgccttcgtgggctttgactgcatcgccaccacaggggaagaagtcaagaacccccagaaggccattcctgtgggcattgtggcgtccctcctcatttgcttcatagcttactttggggtgtccgctgctctcaccctcatgatgccctacttctgcctggacactgacagcccactgcctggcgccttcaagtacaggggctgggaagaagctaagtatgcagtggccgtgggctccctctgcgcactctccaccagtctcctaggttccatgttccccatgccccgagttatctatgccatggctgaagatggactactgtttaaatttttggccaaaatcaacgataggaccaaaacaccaataatcgctactgtgacctcaggcgccatcgctgctgtgatggccttcctctttgaactgaaggacctggtggacctcatgtccattggcactctcctggcttactctttggtggctgcctgtgttttggtcttacggtaccagccagaacaacctaatctggtataccagatggccagaaccaccgatgagctagaccaggtagaccagaacgagatggtcagtgccagtgagtcccagacaggctttttaccagcagccgagaagttttctctgaaaaccatactctcacccaagaacatggagccgtccaaattctcagggctaattgtgaacatttcagccggcctcctagccgttcttatcatcaccgtgtgcattgtggccgtgcttggaagagaggccctggctgaagggacgctgtgggcagtctttgtaatgacaggatcagtcctcctctgcatgctggtgacaggcatcatctggaggcagcctgagagcaagaccaagctctcatttaaggtaccctttgtccccgtacttcctgtcttaagcatctttgtgaacatctatctcatgatgcaactggaccagggcacgtgggtccggttcgcagtgtggatgctgataggctttgccatctactttggctatggggtctggcacagtgaggaagcatccctggctgctggccaggcaaagactcctgatagcaacttggaccagtgcaaatgacccacagccccacccaccaaggtgacagcggttgacgggtgcgcagaggcctgggaccctcacactctctcccctcatgcctcgggaccagctcacacccccaatgtcaccaaagctggtttgtagcctcagccatagctgacatggcctggtcagacaaccctgcagccagctccagagatcctggtcacttctggacagttccttggtttttctcatctccctctgaacaaagaaagcagcccttctccctgccagctgggcgctttgctgcttcggccccagcagaagggaggcccccttctcctcttattcgggaagcaggcctccctccctccctgggaccaccctgcgtacactcatacgtacactccagagggttagtgggcgtctatctccctgtcaacccagccaggacagccacctgaccccaagatgcgagactagcccagtgaggaagctgtctcccagcagtgcaacccaacagcccatcaactccagaatacctagaggaccaacaggcccgcatcttactgctttcaggctggggtattaggatggggccctgatctgcatagaggcttctggaccaagcccagcacagtatagccgttcttacgcgcagaaaacgggaggtccctggagtgatcgattgtatcaagactggatgccagctctgctcacgtggacgagggcgacattctctagccttattcttagcaggcctggatcagtttctgctgctcttggcatctgtcctcactgtcctgagtcactggaacacgaggctatatcagtaggattgtcattctctcaggtcttccaaggtgcttcggacaggtggcactcaattcagggtggtgacactcttctaacgtgacgcgaaggactgctgtgggggtcctccagtcgcttgctgtgaatcactccactggattaacttggggttcactgttgttaatgttccaaccttgggagatggtcaaataattacccagtgccatatcagcttgtggttcgtgatgtgcgctctgcacaagaggtggcttggggtcctaccgctatccctcctgtagctgtggtgcctttgcctgccgtgctactggtaagatttctaccctggcctggaccttctgctccccgagtctgccttcatttcccctcccccatgctccttatctctctgggtgaggccctaggcacacctcttcacttactctgtgtagatagaaaggatggtgagtgagtgctggtggattctggaaccagcagggcacccctcctccactcccaacgccatgacatcagggtgggaaggctggtgtcttagactaatattaatgctgtttttaaagcctagctttctttcctgtctggcctttgacccatgtctggtagaaaccggccgggtaaactgatgacactgtcttcccctctgctccggaaggttcttgggaatggccggagttggtggaactggcctggcacggaacctagtggtggagcacttgcctagcatatgcagggccccagtgctacggaaaattagagaaaccgcccggttgctgtgtcagccagtggagggtagcagagcagccaagagccaggcatcgtgccaggccctgacccccatccaggcactttgtctcctaggttgtctgagaaaacttcaaagggagtattataagaccctaaatgttgagtttctaaaggtatttaaagttatgtagattggtgctgtaaaatattttgataaatattaacttatttcattcgggtcttaattacctgttgtcttcttagggcctgttagatatgtctgggttggtttttttcccccccttgttacttacataggcagagaaggagtgcccagtgaggtgttgggagaattaggtttcactctgtagctgccctagtctagcctctgcctcaggctcctgagtgctaaggtcgtaggtgtgagcctcctctcctcctgctaaactgtctcctcgctttctggatgaaactttcctgtctaaggcagctgaacaatgtgtttacagttgacatttcagccagcagcctggatcccaccaaggggaaaggtgtatatatatatatatatatatatgggtttgatccgccgacagcaatggtggcagatctgctctgtgtgtttcactatgtgacacaggagcaaacacaggccttgctgggggtgggggttggaggggtgacatcctatacccacttcctagtcaggaaaagatatgcaggggtgacttgcctagttagttgattggccactgagcttttactaagtgtggacagttaaccagggaagctcttttggggtgcacgggaacaatgaagcttggagggagtccctaatatgctttttattatgcccccagttccttttcctgaaagaaaacacaagccccaaacccagacaacacacatacacacatccctccggacccacagtaggtagggtcgagtctcctagtctcccgtccaaaaaagagtcccattggattcaaagcgtggccagtatttcctacctggttgggacttaaacattttaaagacaacttcccatgccttcccttcaactagagtgctcacattggaaagacccattttctcaggagcctgtgcccttccttcttgtctctgggtcgaagttcatgaagaagccaatacccagggagctgtgcttaggagtggggcccaagatgtctccacctttcagaaggtgccccagtggtggcttggtggcagaagtgactgcaggaccgtggcaggacatcaggctcctccacctgcccctagtggcaagggttggatatccccctccaaaccccctcctgagcacagcagcgtgtgcacaccaaaggaatatatgacacactccaaccctgtccactacctgccactctcatgcacagggctggggataccagtggctatgtttgtacgttggccctaaccccaggcagacattctgaattgggtagtgttcatagtctcctctaacaaggaacttgcccaacgctggaagaagcttagaaacagcagtgtgagggactgggttcctcccataagcgtggacaagtcccacagaccccctcatatctaccggccaagccacgggcaccgctggcctgtgtacctacctacaatgaaaacatggctggctctcgccggggcccatcctttctgacttgaatgtcgtatgtccccacagaaacttatttcattctaataaaagcttaagcttactgttttcttggtacccaaacactaaggaatcttagtagggatctcagtgccaggatacttgagtccaggtatggttgaggtagccaagtgagtggccaacagagaatacatgagccatggaactgctacagaagtcaaagtcagcggtgaatgtatgttatgtgcggttattttatggagttcaaaccgtcctgtctgtttggcctcctcgtgagaagattgtacgtgaggctcctggggggagagtgaacggtccattccttcagctcattttggtgtgtggaatgcttttattgacacagtggtacaggtgaaatgtgcaccagtccaatgtggttaggatgaaaattttaaggcaaaaagaaaaaaaaatcagctggttttcacctcccttactctagcccagtctggccgtatccgctgctccattgaactggaagaatatggtgtggccaagggtcttgggacatggtgaccaaggagccttcctggaccatcctgttacatgtgctgaatggctagcaaaaaaagcccaggagagatgaaaagaccacgtccaaaaaatgttctcagggcgctggcgtgtccagcagggtcaggaagcaagatttaggaagagacatcatgcaaactaatttattgacaagtgttacctttgcgttccttgacaagctttgcgttggactatttcccattggaaagttataatatatcttgtattaaggtattactgcttgttgtgcctgcagcttcgatgggttaaggtcacagagggtcatgatactaatgagggctggtttattagcaaacctgagcagtaaagtgctttctccagcacaatttttttacttctactgaacacggagccattattaaaagagttatgtgtggattttcattatgtaaattgtatatatttttttgcttgttcgaggttctatttttctaatagtcttcttacagtttcttacaatgacattagattaagtccgatactaactgtaaatcaagctggtctctgttggattcccgtggattaattctatttattttaaggccaagtgcaggtgtcgtccatcacccttttaagaaatgtgaaacttgtgtctcccctcgtggctgaatacattgtacactggcaaaccccctcccgtccctgtgtgtcagagctattttgtggtacattgtgtcatgcttctgcagatgctaataaatcctgtctggcttccaaaaaaaaaaaaaaaaaa

SEQ ID NO: 3359 - DNA, 1748 bp, Rattus norvegicus
  Genbank Accession No. U72349
cttagaacctggactcagaccttcataagagccacaaagaaaccaattctgaaccctatcttggctttggatcctggaagagaatcgctaaacacagagcagacccagtgagtgagcaggtgttttggacaatggactggttgagcccatctctattataaaaatgtctcagagcaaccgggagctggtggttgactttctctcctacaagctctcccagaaaggatacagctggagtcagtttagcgatgtcgaagagaacaggactgaagccccagaagaaactgaaccagaaagggagacccccagtgccatcaatggcaacccatcctggcacctggcggatagccccgcggtgaatggagccactggccacagcagcagtttggatgcgcgggaggtaatccccatggcagcagtgaagcaagcgctgagagaggctggcgatgagtttgaactgcggtaccggagagcattcagtgatctaacatcccagcttcatataaccccagggacagcatatcagagctttgaacaggtagtgaatgaactctttcgggatggggtaaactggggtcgcattgtggccttcttctcctttggcggggcactgtgcgtggaaagcgtagacaaggagatgcaggtattggtgagtcggattgcaagttggatggccacctacctgaatgaccacctagagccttggatccaggagaacggcggctgggtaagaaccacgccccttgtgtgtccgccccttgtgtgtctctcctctgtggagatccctaactgccctttttggtctcctggcatggttgttgaagatatcgattattcaggagacattcctggcttactttaataccaggggttaactttgggaatattgatgaccctgtttttaaggaacctgtatttttcattctggctacccttgtggccccgcagtttcatagttttgttccaatttctcggcaaagaaaaacagcctgtgtgtttacttggcttaaaacctaggagagtagcaagttctccctgtgttctgctcactctcacgtaatgggtcaccttggctggggggggaaggtaatataatacctggaggaactgcagagctgataaccccaggctcctgtgtgctcgcatgcatgctattcagaccatttggtcaggcaggagccccactggcttgactggctgaatattgtctgattttagagaaggtggtctgagccaattgtgtttgtgctgtgcccctaagttcattttcaccatggttggcttgtttggggagcccttgctgtgccccaggactttgtacctcactgccctggatcagttggggatctcccagctgctctggcccagtgtttttctgctcagggccctggggcctctttactaaagcactgtttgctgctggcagacacgaaccaggtctgtgaggctccataggaaattaagatttggtgacagactggacgtgggtgtgagtcctgaccctgtcacttaactggccatgtgaccttggtcaggctgacttaccttctgggcctcagcttctcacagactgttgtgactcttaaagataaagcgagcagaagctgacaccagtgagtgccttttcttctgctcacccttgtgctcaccagggtgagatagaggtgagaatgcccttactggtgaccactgtggtaggcatttaccgttcggagggaactccattctggaataggggagaatgcgac

SEQ ID NO: 3360 - DNA, 1742 bp, Rattus norvegicus
  Genbank Accession No. U72350
cacagagcagacccagtgagtgagcaggtgttttggacaatggactggttgagcccatctctattataaaaatgtctcagagcaaccgggagctggtggttgactttctctcctacaagctctcccagaaaggatacagctggagtcagtttagcgatgtcgaagagaacaggactgaagccccagaagaaactgaaccagaaagggagacccccagtgccatcaatggcaacccatcctggcacctggcggatagccccgcggtgaatggagccactggccacagcagcagtttggatgcgcgggaggtaatccccatggcagcagtgaagcaagcgctgagagaggctggcgatgagtttgaactgcggtaccggagagcattcagtgatctaacatcccagcttcatataaccccagggacagcatatcagagctttgaacaggtagtgaatgaactctttcgggatggggtaaactggggtcgcattgtggccttcttctcctttggcggggcactgtgcgtggaaagcgtagacaaggagatgcaggtattggtgagtcggattgcaagttggatggccacctacctgaatgaccacctagagccttggatccaggagaacggcggctgggacacttttgtggatctctacgggaacaatgcagcagccgagagccggaaaggccaggagcgtttcaaccgctggttcctgacgggcatgactgtggctggtgtagttctgctgggctcactcttcagtcggaagtgaccagacactgaccgtccactcacctctcacctcccaccttgcccccaccacaactctctcttcagccaccattgctaccaggagaaccactacatgcaactcacgccccttcccctattatagggttgggcctagacggagtcccctgcagttagctttctagaatctaccacgcttctgtgaaagccaccttccccccacatctcagttcccttggcctcaaaactcacaaggtttttcctcagatcagctccttggaggctggcaggagtgggaaggggtgtgctagagggagaagagcctgccttgttggtgggaccctgattacccctgagcctctcgggaatgcttttctggcagggagctggagagctctctaaacctcttcccccagagactagattgccttggttttgatgtgtgtggcctcagaattgatccatttcccattctgctgtgtccctggggcggctcctccttcccatctccacccccccccccccagagccattgagtgaggtgcttttagcccttttgactaactaaaaatgcaggctgcttgggataacgaggcaaggacctcctccccacctgtggcctggccaagcccccactcctggtctgaatgttctcctgaggcctctggctagagtccagccccacccaggaggagggacggagctgcggaaagtccaccctgcgagagcctgagcggctcttgcggcttagcaccaccccagatccttctccacccctcccctggctccatggtgaccatgactgagggaccaactgggcccacgctaggtgccccagagctgttaatgacttcagctgcctcacttcctgcaagatcagcctgtggcatctttgccttgggtgctggccacagggtccagggactctggccttagcccagaagtgagaggaagcttacagcgcagctatgggagccctgggggcttccct

SEQ ID NO: 3361 - DNA, 1142 bp, Rattus norvegicus
  Genbank Accession No. U72660
ctgggcggcccgggcggccgcaccatggatcccggcaccgaggagtacgagctcaacggcgacctgcgccctggctctcccggttcccccgacgcctcgccaccccgctggggtttgaggaaccggcccatcaatgtaaaccattacgccaacaagaagagcgccgcggagagcatgctggacatcgcactgctcatggccaacgcgtcgcagctcaaggccgtggtggagcagggcaatgagttcgccttcttcgtgcccctcgtggtgctcatctccatctctctcgtgctgcagatcggagtgggcgtgctgctcatcttcctggtcaagtatgacctcaacaacccagccaagcacgccaagctggacttccttaacaacctggccacggggctggttttcatcatcgtggtggtcaacatcttcattacggcctttggagtccagaagcctgtcatggacgtggcaccccggcagtaggatgcccagagaccttgaaggtatctgacctgcagcccagctgtccagacccctgcaactgctgtatccccaaggcatccctctcctgttcacagcccaaggtggcctccgctggaccatggtcaaggatggacttccgtccacctgtgactgctgcgtgggcggccacccgaggcgtgtgggaactggatgcaaagccatgaagatcagaactggacagttccaccgaaacccacgcccagaggatgatcactgcccgcccaaggacatgcaggaaatccatgattggactcgatgaggggccagaactgatctctgtctcaggacattccagaaggaccaggatatgcccctccctttgctgatacaccagtgaccctacttctcatggagcatgcacaggtcaccctggagactgctccctttgttgtttcctgacccagggaccttggacagtcatcagtacctgctggctccagcctcagtgcctgggcttggcagtgtctcttggcatcgagaggcagccatgcctgtgggggctgcaggtcatcctggtaccttctaccagtagtgacttgggaagagccccaccccccaacccaggggctcaggccccaattttctaatcaggaatgacaataaagcttatgtcttccccc

SEQ ID NO: 3362 - DNA, 1070 bp, Rattus norvegicus
  Genbank Accession No. U72741
aagagatggctttcttcagcacccagcctccatacatgaacccagtcatcccctttactggaataatccaaggagggttgcagaacggacttcagatcaccctccaggggaccgtccacccttttccaaataggattgcggtgaactttcagactggcttcagtggaaatgacattgccttccacttcaatccccggtttgaggaaggaggatatgtggtttgcaacacaaagcagaatggaaagtgggggcctgaggagaggaagatgcagatgcccttccagaaggggatgccctttgagctttgcttcctggtacagaggtcggaattcaaggtgatggtgaacaagaacttctttgtacagtactcacaccgcgtgccctaccacctcgtggacaccatttcggtctcgggatgcttgcacctgtccttcatcaacttccagaactccactgcagcccctgtccagcctgtcttctccacaatgcaattctctcagccagtccagttcccacggatgcccaaggggcgcaaacagcgaactcagggctttcagcctgccctccaggcacccgtggctcaaactatcatccacacagttcacagcatccctggacagatgctctctactcctggaatccctcctatggcataccccaccccagcctatactatacctttcttcaccagcatcccaaatgggttttacccatccaagtccatcaacatatcaggcgtggtcttgccagatgctaagaggttccatatcaaccttcgctgtgggggtgacattgctttccacctgaacccccgtttcaatgagaaggttgtggtccgaaacactcagatcaacaactcctgggggcccgaggagcgaagcctgcctgggagaatgcccttcaatcgtggccagagtttctcagtgtggatcttatgtgaaggtcactgcttcaaggtggccgtggatggtcagcatatttgtgaatattaccaccgcctgaagaacttgccggatatcaacactctagaggtggccggtgatatccagctgacacacgtgcagacctag

SEQ ID NO: 3363 - DNA, 1428 bp, Rattus norvegicus
  Genbank Accession No. U73174
ctgtttctgctacttgctctttgtttcaaactgccttggagagtttctcacagtaccgtgtgcttcttgctaacttccggtttaagctttagtcgttctctagtctcttcagttttcaccctgagcctcgacactggactactgaaatcgtgtagtgaacgttggatgtgtcccaaaaaggtaatgtggaacacagccgtgcactcggaattcatacatgatcacgtggattacggctttcaaaactgcaagagtaaattcaattggcatgtcatcaaggagaagcgggatgcttacgtgagccgcctgaacaacatctaccaaaacaatttaaccaagtcccacatcgaagtcatccacggctacgcaacatttcgagatggtccccagcccacagcggaagtcaacgggaagaagttcactgctccgcacatcctgatcgccacgggtggtgtgcccacggttcctcatgagaaccagatcccaggtgccagcctggggataaccagtgatgggttctttcagctggaagacttgcccagccgcagcgttattgtgggtgccggttacattgccgtggagattgcgggcatcctctccgccctgggctccaagacgtctcttatgatcaggcatgataaggtgcttagaagctttgattcactcatcagttccaactgcaccgaggagctggagaacgctggcggtgttgaggttctcacagttaagaagttctcacaggttaaggaagtaaagaagacctcatcgggcttggaactccatgtggttactgcacttcccggtaggaaacccaccgtgaccacgattccagatgtcgattgcctgctctgggccattggacgggacccaaactctaagggcctgaatctaaataaactggggatacagactgatgacaaaggccatatcctagtggacgagttccagaataccaatgtcaaaggcgtctatgccgtgggcgatgtctgtgggaaagcacttctcaccccagttgcgatcgctgctggccggaaactcgcccatagactttttgagggcaaagaagattccaggttggactatgacaacatccctaccgtggtcttcagccacccgcctatcgggacagtggggctcactgaagatgaagccgtccataagtatggcaaagacaatgtgaaaatctactcgaccgccttcaccccgatgtatcacgctgtgaccacgaggaagacgaaatgcgtgatgaagatggtttgtgccaacaaagaggagaaggtggttggcatccatatgcaggggattggctgcgatgagatgcttcagggcttcgctgtagcagtgaaaatgggggccaccaaggccgacttcgacaatagggtcgccattcatcctacctcttcagaggagctggtcacacttcgttga

SEQ ID NO: 3364 - DNA, 370 bp, Rattus norvegicus
  Genbank Accession No. U75392
  misc_feature (1)..(370): n = a or c or g or t
acagntgacaaccttgtgctgaatttgcaggatgaaagtttaattcggggaagngacagcttcattaagggtaagaagtgagtgtggacatcaagaaccccaccaccagagaagttggcacacttttccagtttggaggggccagctagggggtcaagcataccccaccctgacccaagcatcatgtgatggattcttctgtatctgctctcttggattaaggaagactgaagaccaaccctttcagaggggttttcctccttcttgtattggctgggaagggggggggacaggagacagtgtgatttctcagtgatttcctgtagtgttgtccctctccctgaatggggggagataaccaccatgccag

SEQ ID NO: 3365 - DNA, 196 bp, Rattus norvegicus
  Genbank Accession No. U75393
aaagaggaagatgctttgaaggacacgacatgaattttaaggctgtggaggaaatctcacagactggagagcccgtccagactgcagcccaggcacctgaccctggtctctcagtacaggggaagtccaggcatgttttagaatgtcctaaattgagctattttcacttactgtgtaacagagacagataataaat

SEQ ID NO: 3366 - DNA, 393 bp, Rattus norvegicus
  Genbank Accession No. U75397
gacacaccttgccgatggctgaacatgtgcaattcgtgagggacacgctcacttctagccttaagggggtaggagtgatgtttcaggggaggctttagagcacgatgaggaagagggctgagctgagctttggttctccagaatgtaagaagaaaaaatttaaaacaaaaatctgaactctcaaaagtctatttttttaactgaaaatgtagatttatccatgttcgggagttggaatgctgcggttacctactgagtaggcggtgacttttgtatgctatgaacatgaagttcattattttgtggttttattttacttcgtacttgtgtttgcttaaacaaagtgacttgtttggcttataaacacattgaatgcgctttactgcccatggg

SEQ ID NO: 3367 - DNA, 376 bp, Rattus norvegicus
  Genbank Accession No. U75400
  misc_feature (1)..(376): n = a or c or g or t
gaggagaatgttatggaggaggcaaaaggttttcagccttcaagacnaccagttcagcaggacctgatggggaaaccagtttttagcccagttatcatggcttcccaaaccantcacaaagaagaaaagagtttccaggaattagaagatgatttagataccatggaattagaggatattgatacaacagacatcaatctggatgaagatattctggatgactaaagtttgccatttactccagtaagagattatgatggcacatacaaatcagtcaccaccctgaccagaactgtggcaatccttgctntgcacacgtaaacaaggaggaacatagccccttcatnttcagggcagagttttaactgaaacagac

SEQ ID NO: 3368 - DNA, 2301 bp, Rattus norvegicus
  Genbank Accession No. U75903
gaattcggcacgagctgtcttgccttggtctgcacttctcccatggctcctgcagacattccagcctctcttcctctcggtctgtgcctgctgctggcctctggctttgggcatgcaggcaagctgctggtggtgcccatggatggcagccactggttcaccatgcagatggttgtggagaagctccttcccaaaggccatgaggtggtggtggttgttccagaggtcagttggcagctgggaaaaccactgaattttacggtgaaaacgtattcagtttctcacactcaggaggatttaaatcgggagttcaagttttttattgattctcagtggaaaactcaacaagagggcggagttcttcctctactgactagccctgcccagggtttcttcgaattactgttttcacactgtaggagtttgtttaaggacaagaagttagtggagtacttgaagcagagttcgtttgatgctgtgtttctggatccttttgatgtgtgtggcttaactgttgccaagtacttttctctcccgtcagtggtcttcagcagggggatattttgtcactatcttgaagaaggctcccagtgccccagtcctccttcatatgtccccagaggtatcttgaaactcacagataccatgactttcaaggaaagagtgtggaaccttctttcctacatgggggagcatgcattctgtcccagttttttcaaaactgctaccgacattgcctctgaagttctccagaccccggtgactatgacagacctcttcagcccagtgtccgtttggttgttacgcacagacttcacgttggaattacccagacctgtgatgcccaatgtgatccacattggagggatcaactgccaccaaaggaagccactttccaaggaatttgaagcctatgtcaacgcctccggagaacatggcatcgtggttttctctttgggatccatggtctcagagattccagagaagaaagcgatggaaattgctgaggctttgggcagaattcctcagacggtcctgtggcgctacaccggaactagaccatcgaaccttgcaaagaacactattcttgtcaaatggctaccccaaaacgatctgcttggtcatccaaaggctcgggcgttcatcacacactccggttcccatggtatttatgaaggaatatgcaatggggttccaatggtgatgatgccttggaaaacgcccttaaaactgtcatcaataacaagagttacaaggagaacatcatgcgcctctccagccttcacaaggaccgtcctatccttgtttggtcatcagatggacaacgccaagcgcatgcaaactcggggagctggggtgaccctgaatgtcctggaaatgactgccgatgatgagcctctggacctggctgtgttctgggtggagtacgtgatgaggcacaagggggcgccacacctgcgccccgccgcccacgacctcacctggtaccagtaccactccttggacgtgattggctttctcctggccatcgtgttcacggtggtcttcattgtctataaaagttgtgcctatggctgccggaaatgctttgggggaaagggtcgagtgaagaaatcacacaaatccaagacccactgagaagtggcaggaagtgaaggagaagtattagtcccttatccaatcagttgaaacttggaaacaagtgttaaatccatgttgcttttattagggaaataattcaccatacactatacacccagaacatttttttttctttttctttttttcggagctggggaccgaacccagaacattttttttttaaataaaaacaatctaattgctggccacacccatcagggaagatactggaatatgtgatctgtttctccagtatcttcagtctggacaatgactgccatctgttggtaacttacagaaagtttagtgttctgttctgccttcagtgacagcaccacagtttcccttactcctgtcagctaatggcttcctcccctggattctcagaccagtgtggccttcccagtgttagtcattcctcactgtgctcatgttttgtgggtggcacggcctttgagctttgggagaaaacaagatgaggctgtgacactggtggccctgtgtttgagataataattattgcttgtctctgaatttgatgaaaactgaagtacattctaaagaaagtatgtcttctattgtgttcccaaaccaagaacttgtcaataaattcatataaattgtattattacttttaaaaaaaaaaaaaaaaaactcgag

SEQ ID NO: 3369 - DNA, 797 bp, Rattus norvegicus
  Genbank Accession No. U75917
  misc_feature (1)..(797): n = a or c or g or t
agccctgggccccacaactgcaagcagagccggagccgcccagttacagcgggacccgggcctctggggtccanacaggggtcgccatgatccgattcattctcatccagaaccgggcaggcaagacacgcctggccaagtggtatatgcagttcgatgatgacgagaagcagaagttgatcgaggaagtgcacgccgtggtcaccgtcagggatgccaagcacaccaactttgtggagttccggaacttcaagatcatctaccggcgctacgctggcctctacttctgcatctgcgttgacgtcaacgacaacaatctggcctatcttgaaggcatccacaacttcgtagaagtgttaaatgaatacttccacaatgtctgtgaactggacctggtgttcaacttctacaggttttacacggtggtagatgagattttcttggcaggagagatccgagagaggagccagacgaaggtgctgaagcagctgctgatgctgcagtcgctggagtgagggggggcttccgccccagcccggcntgntgggccaacatgcntgtttgtcccctgccaggtttgaggcccaccccagcagccccttccnttctttagntggcccagaggagtgacccagcagggtttaggccacaggggaggaggccagaacccactgcctttgggccctaagtggatggcagaggccaccgtgatgtcccgagtaactgtgccattattgtgtgatgctgtgagtgtgcgtgtgtgcagcccccaataaacctgtggtcctgcctgnaaa

SEQ ID NO: 3370 - DNA, 196 bp, Rattus norvegicus
  Genbank Accession No. U75921
  misc_feature (1)..(196): n = a or c or g or t
agtgagaantttatgtctwaaaataaatttttganaaatttcatcttttttggganagttctttctggtccaccttttacccaagggttattttaccttaaccccagttgtcttcagactttccggtgtctcctcctttgtcgtggcgaagcaacttgttaccgatcaattgaatgaaaaaaaaaaaaaaaaaaaa

SEQ ID NO: 3371 - DNA, 1690 bp, Rattus norvegicus
  Genbank Accession No. U76551
ctgaacggagggtactggtcaggtgcgatgtgcgtctgccccaatggcttctcaggggatcgctgtcagaacagagtccctgtggtcgactgccagaacggaggcacgtgggatgggctcaaatgtcagtgtaccggcctcttctatggcccaaggtgtgaggaagtgatggagagcgtagagataaagccgacggtctctgcatctgtggaagtgagtgtgacagtaaccagtcaagaatatagtaatgagctacaggaccgaaactccacagaattccgtaacttcaatgagacattcacaaagcagatggcgataatttatgctggtatcccggagtatgaaggagttatcatcaaaaatctgagcaaaggcagtatcgtggtggattatgatgtcatcctgaaggcccagtacaccccaggattcgacaacaccttagataacatcgtcagtaacctggagacaaaaatcaagaatgcgacaacagttcaagtacaagatgccaataatacctgttcagccttactgtgtttcaactcgactgccacccgggtgcaaaccaacgttacagtagtcagtgacaatcttgaggaggtgtgcaagaaagaggctggagaggactttgcaaagtatgtcaccctggggctcaaggacaataagtggtactgtgtcacgccttgttcatcaggctacagtacctccaagaactgcagctatggcaaatgtcagttgcagcgaagtggaccccggtgcctctgcttgtccacggatactcactggtacagcggtgaaaactgcgactggggcacccagaaaagtctggtgtatgggctcgtgggagccggggtggcagtgctgttggtgattcttgtgatcctcgctgtgttctccgtccactacagaagagatgcacaaaggcaagagtccagagtgtctgagatgtacaggtggggtgaagaggcaggcagagcatctcccggaaccttccacaacattggctttgagcacaacgaagaacaagaaaacgatatttccttggactctgtgtacagcaacttccagccctccctaagccacataaaccctgaaggaaagatccagatccagagaccccaggtggccatgacaccgttgtaaatactaacacaaaaacggttttgcacggatctgtggagctgaagaccgagaagtgtgtttgaccaagcatggcggaacacaccctacgttgagatttccccatggagacttattgggaaatagaccctgcagttagcaagaatggatacgagagagacgatgctggaagctcagacagtatggaaactgcagtggccatgttatgacggcaagcgatgatccctaccggaacctcatccccagagatgctctccttcccgtgggcccacattcagcaccaaggacagtgcccacctgctgccattgccattggtataacattagattgcattttacaaaacacacttctaggaaagcttacctcccatctccatgacaagcactgtttttaacacagactatccatctttttaaggtcatacttagttttaagtttctctttaacatattaaagcttttattttgttgaattctagtttaccttatgtaaataaaagtatatgcttattttctaaaaaaaaaaaaaaaaaaaaaaaaaaaaaaaaaaaaa

SEQ ID NO: 3372 - DNA, 429 bp, Rattus norvegicus
  Genbank Accession No. U77829
gtgaggcgaagctgagcaggaatggccctgtggacctctgtgatgggacatctggtggaatctcacaggcagttctgtggcaaagatggatgaaagctaaggactcatgaggaagctggataactgaacaaagccatgtacaagaatgggaagccagaaaatgggatggtggagtttgaatcaggtggacagttctaaaagtacaaatgatttcgtataaaggtaccacatgtgggtccctttaactgaaggcatggcaagctccacacaaggtccttcatttctgaatttcaagggctcctctgacaagtggacagtgcagtgggtgcaccttttccagaggtgactggatggatgcttgaacagaagatttgccaaatagacattgtgctgtcaagaattttaccattaaaagtgcattattgtagc

SEQ ID NO: 3373 - DNA, 1627 bp, Rattus norvegicus
  Genbank Accession No. U77918
catttctccctcacaaactggagcaaccggcgagcccggggcgggccctgtggcctcggtttggttcgtggagtcccagcggcagattcgctcggcaacgcggacagggccaattctgtcgcgtcaggaatcgcgggtgaagttcgccaccggtggagagaagacgttgagaaaagccgcgctgggctccctcaggggctcgtgcgcactcccagtttcggccttttcatgcaggaaatgaatctgctgccgacgcccgagagtccagtgactcggcaggagaagatggcgaccgtgtgggatgaagctgagcaagatggcattggggaggaggtgctcaagatgtccacagaagagatcgtccagcgcacacggctgctagacagcgagatcaagatcatgaagagtgaagtgctgcgagtcacccacgaactccaagccatgaaagacaaaatcaaagagaacagtgagaaaatcaaagtgaacaacaccctcccatacctagtctccaacgttattgagttgctggatgttgaccccaatgaccaggaggaggatggtgccaatattgacctggactcgcagaggaagggcaagtgtgcagtgatcaaaacttctacccgacaaacgtacttcctgccagtgattgggttggtagatgccgaaaagctgaagccgggagacctggtgggtgtgaacaaagactcctatctgatcctggagaccctgcccaccgaatatgactctcgggtgaaggccatggaggtggacgagcggcccacagagcaatacagtgacattggcggcctggacaagcagatccaggagctggtggaagccattgtcctgcctatgaaccacaaagagaagtttgagaacttgggtatccagcccccaaaaggagtgctgatgtatgggccgcctggtacagggaagactctcctcgcccgagcctgtgctgctcagaccaaggccaccttcttgaagctggcaggccctcagctggtgcagatgtttattggagatggcgccaagctggtccgtgatgcttttgccctggccaaggagaaggcaccatctattatctttatagatgagttggatgccattggcaccaagcgcttcgacagtgaaaaggcaggggaccgagaggtgcagaggaccatgctagagctcctgaaccagatggatggcttccagcccaacacccaagtgaaggtaattgcagccactaacagggtggacatcctggaccctgccctgctccgctcaggacgcctagaccgcaagattgagtttccaatgcccaatgaggaggcccgagccagaattatgcagatccactcacggaagatgaacgtcagtcctgatgtgaactatgaagagctggctcgctgcactgatgacttcaatggggcccagtgcaaggccgtgtgtgtggaggcgggtatgatcgcactgcgcaggggtgccacggagctcactcacgaggactacatggagggcatcctggaggtgcaggccaagaagaaagccaaccttcagtactatgcctagggacacctctagtctgtctgctggggcgggggctcggttgataataaagggggtttttgttcttttccca

SEQ ID NO: 3374 - DNA, 7628 bp, Rattus norvegicus
  Genbank Accession No. U78090
cccgctgtacttcaccaggcagtactaggccatagatcccgtgttccgggctcggcgctccgggcttcccagggctgggcccgggacgcggcctcccgccatggcgcagctggagggttattacttctcggccgccttgagctgcaccttcctggtgtcctgcctgctcttctccgccttcagccgcgctctgcgtgagccttacatggacgagatcttccacctgccgcaggcgcagcgctactgcgagggccgcttctcactgtcacagtgggatcctatgattactacattacctggcctgtacctggtgtcggtcggagtggtcaaacctgccagctggatccttggctggtctgagcatgtcgtctgctccatcggaatgctcagatttgtcaatcttctcttcagtgttggcaacttctatttgctgtatttgctcttcaggaagatacagcccagaaacaaggcttcttcaagtatccagagaatcttgtcaacattaaccctagcagtatttccaaccctctatttttttaactttctttactatacagaagccggctctgtattctttactctttttgcttatttgatgtgtctttacggcaaccataggacttcggccttgcttgggttttgtggcttcatgtttcgtcagaccaatatcatctgggctgccttctgtgcaggacacatcattgcacagaagtgcagtgaagcctggaagactgaactacagaagaagaaggaagagaggcttcccccggctaaaggaccgctctcggaactcagaagagttcttcagtttctgctgatgtactccatgtcccttaagaacctgagtatgcttttccttttgacctggccctacatgcttctgctgttggcatttttcgtttttgtggtggttaatggtgggattgtcgtgggtgatcggagtagtcatgaggcctgcctccattttcctcagttgttctacttcttctcctttactgcctttttttcctttcctcacctactttctccgaccaaagtcaagacttttcttagcttagtttggaaacgtagagttcagttctctgtgattactttagtctcggtatttttggtttggaaattcacttacgtccataagtatttactggcagacaataggcattacacgttttatgtgtggaaaagagtatttcagagacatgaaattgtcaagtatttattagttccagcctacatgtttgctggttgggctgtagctgactctttaaaatcaaagtcaattttctggaatttaatgttttttgtatgcttggttgcttctacggttcctcagaaactactagaattccgttacttcattttaccatacattatttataggctcaacatgcctctgccacccatatctagacttgtttgtgaactgggttgctatgcagttgtcaattttctaactttttacatctttctgaacaagacttttcagtggtcggatagtcatgacatccaaaggtttatgtggtagtggcagggctattttgaactctaagagcctatttctacaacagatgactgggtaaaggagtgtggatttcttttaagtaaattcagggagacgaaaagaattacatttgaggctagcctaaaagcttagataatgctaataaatttgcttgcagttgtcttgagaatcttttcagaagtttggggattttccgtgtatgtaggggactgggtgagctccgtagcaccagaacctgtcaaccaacttcctttgtaaagaacagtgaagaatgtgaaaactgtttacaaataaatgacctagtggtatttctgagcaaaattgccagatattgcagtaaatatagctctggtcttagtaacttatgaacgagattctgggatgtctatctaggaattgggtattttaactaagaatatagaagtgatgaagccatttgaactaactccttatttgaaggttttgcaggccgaaggtaagctgtgctgattatgacaccttttatagataatctttctgaaatactgctctgttagttgtccagggctcctgcacaaaactgaccataaaccttgtggcttcagagttttttctcacatacgaataagcagcacctaaactcgagtgctggcagagctcctaaactcgagtgctggcagagctcgctccttcaggagacaagagttcattgttcctgttcagctcactccttagaggggccttacttttagacaggtccctccagtctgtctgtgtctgcacaggactgtctccaccggcttcttgtgcagttaatgccattggctttagggatcctctgattcagggtaacggtacctggagaccctggattatatctatcacatttttaaagtaagttccctttcagaggtcccacatcattttggtgtgtgtgtgtgtgtgtgtgtgtgtgtgtgtgtgtgtgtgtgtgtgtgtgtgtaagtaagatgaccttgatgagagcttttaagtaaaagttagtttttaaaagagaggccaaaaaacaacaacaacaaaacccagatggccaaggtcatgtaatttacatttgtccctattatccaaacaaaccagaactcagaaggtgagaggtcattggtttagtttcattttataatttaggaagcactactaggctctggggtttgctttgtctgggttccggttctgtgctgctgtttaaagtttgtttattgattgtcaccattgttacagacactgttgcttagtcctgtgctgagagtgtaaacacggaagtgtgacttgggcttacttagcccacttcctgagctttacacacacacacacacacacacacacacacacacacactcactccccaaaggaacagaaccttttattttattggataatgttttctttgagttttaaatatgtagtaaactttatacaactttaaaaactacttggataaaagttacaagcatagccctgggtggtcagcccgcacagaccactctgatgcttcggaggtttgctcaagtgtaacagtgactggtgtgttagcacatcagaaagcttcatgacactttattatgatagaagctaagtccaggaagcaaacacttgcaattgaataaagcaagtgctgtctgatgcttagtccctggcttttgtgtctgggaacacagagggatggagtgcttcatcccagtagtctgctgtaaggagggaagcactttgtcccatgtaatggaaggaggctgctttcagatatgttgagtcccttcagaattaggagacatcgtaggggtctacagagagagagagagagagagagagagaaagagagagagagagagagagagagagagagagaaaataagtactggtattctacaccacttcccattatgtattggaagtaggacttggcatttcagactgcagtgccatggactaaaaggtgctatttagttgttactgtgatcttaaaaatggatgcatgttgatacatttgaggtaggggtttggttaatgttgcttgggcagttgacaagttaatggtcatttgctgataaatttctcagtcttttaactcagtatgtgagagaaaaaggcttcacccggcggttcacttttggttgttcaaattaacagccccatctctgaagtcatttcacttgggaaaaaaatccttgcttttgcaaatgtagattgtatttctactttaatttttaaaaagaattatcaagtagttttcattagacttaattgatttattgatcataagaggctcagtggttaaaagcttgagcccccattgcagggacccccgtgtggttccttgcccctagggcagcctctagggcactgactgcaggcttccagctctgcagcctcctgaactcatctgctgtaaacacactgcccaccgcctacttcagttaaaaactctaaatggtcagtgtagaaaatgtcagctgctgaaggggtgtggagtgcgagttctccatcactcttccagtggacattttagagcctttatgaagaggcccaggcttgcctgagctgctctaggctcagtggtcagttttagcagctctgctttctgtgacaatccacaggcatagactcacttcccagacacattagaacgagtgtgtgcactgtacctgcttatatttacacttccttggacagccttcccacggctgcgtctcaccaaaccttgtggacatagtgtgttgtactttacacatagtacataatcttgtacgaggaatttctgtgctcatggaccatctgtgtttgtcgttgtaaaacacccactgtaaacagtgtgatttacttacagggaatagcttaggatatccgtgatgtatttctggtgtgaacttacctgacttggacattgtgctcatctcctttgtctggagaggagagaagggagtcccagctttcatttataactcctagagagtagacatatattttaggtcaagttcaaactgtattcaggtaaaatcatatcttagagcagttagaaagcctttaaatgttaagacaagtgtaattttaatgtatacaatattttgcatagatgaacttaagatgtagaaaagaatgcccttgattttggttccacataaaaaagacagattgttgaaagacaggtgcttgttcctgatctcagatgagaatgttatgtttgaactcttgttagtacctggggtgagtcctaccgcatttcaacaggattcatgctgtagtacatatctgtatgctcataaacatgctgtttgatgtatatcgagtaaatttgtattgaatggagttttcaatatagaaggaagcagatattctagaaaagtatcatataaccaacttaatcttaggaagcaaatgtgttttatactaagccatcctgacccatcctctgcctgttttctgaatgttattttctatagtaatgaatttagtcatgcccgtttagtatgcgccgtgtgcaataggcttgattctaacaatgccatttaaatatgaagtcattcagtaattacagtaagtttgatgacttgtcttttacatttcaatcagttagaaacatcttctgtttggttttagctctctgatttacttttctttgggtgcattttaggtatttgaagtcaatggcaaaatgttgctgagaaatataaacaacttagttaatgatgacataattttaatatatcgaaatgattccagcactaaattccataatgtttggaagttatttctaaagtaaatttggtgataataggtatctaataatctctttttattatttaaaatgagatattgattagtggcattctccataccttagacactgttaaagcaaaagtaggtagggtatatttttctttcaaaaaagtaaatatatggaatttgcattcagaaatttgatcagttcaatttatttgagccctgtactttcactgtcttgctcaagatgaataagaatgaaaagaattacagtagttgtctttctcaatagtgttttgctggttcacacacacacacgcactcacactcacactcacacacatcataaagctgaccttttgctattttgtttcgctatcaaagctgtactggtctgacctctcatgttattgtgtgagttacaggtttttaaaatccttaggagccttttagaggaacatgtataaaatgataaacgcttaggttttattacaagatgagttgttgaacaaattgttgatgtttaattggaaaaacatagctcccataacaacaagttcttacggttatttgaaagcataatacattgctttaaatgtagatcagtggtcaacaaataggttttaactcacaaaaacaccctttcttaattatgttgtctctttaggggcatagagctcccctaaataagttttgtatttactgaaaacatttcactgggaaagcgtcagtggcttgagagagtagatatgggatagtgtcttttcaagggtctcaaaacctgccattttaaacgtgagtttattgtagttcatgttctttatattcttcggtaagtcaggttcaagaatctcttgaagtattctgcctttcatatattttgtttctgaaataaagtggatgtttagctttcgttaagctggtttttaaattgtgtcatacacccagccacaggtggtgtaaagtctcagcgcaccagtaatgcagtgtttacccacatacgtttgtgttcctttgtcaggagagaagtgtatttgggtttcccctgtagtgaggaataggaaagtactgtgtaatcaaatttgtactgaaatgtttactaggtgatgacagtgggctacattttaacgtattcttgtaatttaactttttctactagtctggattaaactttttatagttttgtattgttttgaaccacaaagatttagaattctccaccttcattaatgattatttgttgttcaggaagggtctcataatccaggctagcctggaatttacaatgtagccaagaaagaccttgaactcctgattcttttgcctctacctctggactgctgggttcccggcatgccgcaccatgcccagtgtatgcagtgctggggagcaaacacagaacttagggcagccggcaagcagtctgccagctgggctgtttcctccagccctgctgcttctactgtggccgaaaatgttccctgggttccatgaagtggaaggtaaatgtgaaaccaaaagtcatttgttccatgattaaattgtgtctcagatgacggaacctaatgcacccggccatgaaactgtttacctcacagactgggggatgtttctgatagtgataataggtttggaaacaacctgaactgtctacttctgtctcgctggttctcaggcctcttgtgttaactgtaccacatacacggagagactgaggagagggtgggtttttgtctcatattagaataagcagaatgagtatttgtctaatgttacaaagtagctgtgtgagctgcctttatgagtgggcagcctgacgagaatcgggctcttagctgcagctgagatggagtagtaggaaggacactgagtctaccttcctttttgtaacattttggaaaacaaattccatgggaaatagaactccactacttttctagatcagacagttgaggcgcatacagactgtctcttccagagcaggcagtctctcccattgtgtcatcacggcctcagcttgttgtgtgaacacaaaatctacagcacgggctgaagttgtcagcccgattaacaaggaagtaaagatctttgatatccaatagagatgtagttgcctaagaattaatttctcaaaagaactttggaaataaatggttgttttaaactgatctgtgatttttaaataatcttttctgaaagaatttgatgtttattttaaatacgtgaatatatgttttaaccgttttttaaggttttacattttgttacattcaaaacttaagatgtttgactctaaaattgtgattcatgtcatttaaactcttgaataaacctatttataagaataaaagcgttttaaatagttaaaaaaaaa

SEQ ID NO: 3375 - DNA, 936 bp, Rattus norvegicus
  Genbank Accession No. U78977
caggaacgcaccggaaagctcacctgtgcagtaggggacggaggcaatgacgtcagcatgatccaggaatcagactgcggcgtgggcgtggagggcaaggaaggaaagcaggcttcgctggccgcggacttctccatcacccagttcaagcatctcggccggctactcatggtgcacggccggaacagctacaagcgctcggcggctctcagccagttcgtcatccacaggagcctctgcatcagtaccatgcaggccgtcttctcttccgtgttctactttgcatccgttcctctctaccaaggcttcctgatcatcgggtattctaccatctacaccatgtttcccgtgttttccctggtcttggacaaagacgtgaagtcagaagttgccatgttgtatcctgagctctacaaggacctcctcaaggggcggccactgtcctacaagacgttcttaatttgggtgttaatcagcatctatcaagggagcaccatcatgtacggggcgctgctgctgttcgagtccgaatttgtacacatcgtggctatctctttcacgtcactcatcctcaccgagctactgatggtggcgctcactatccagacgtggcactggctcatgacagtggccgagctgctcagcctggcctgctacatcgcctccctggtgttcctccacgagttcatcgatgtctacttcattgctaccctgtcgttcctctggaaggtgtccgtcatcaccctggtcagctgtctccccctctacgtcctcaagtacctgcggagacggttctccccccccagctactccaagctcacttcataagctgcaaggcggcagcagggcctccggtctctgcgctctccctggaggaggtcaagttcaggcgcatgaccacctcaggtggatggcgcagtcacagctggcacatga

SEQ ID NO: 3376 - DNA, 4044 bp, Rattus norvegicus
  Genbank Accession No. U81037
gctgatcagcttaaaaccatgccgaagaagaagcccttgtctgcaggcagagcgcccctgtttctcttcctgtgccagatgatcagcgctctggatgttcctcttgatccaaagctccttgatgacttggtacagcctccaactatcactcaacagtcaccaaaagactacatcattgacccacgggagaatattgtaatccaatgtgaggccaaagggaaacctcctccaagcttttcctggactcgtaacggaacacattttgacatagacaaagaccctctggtcactatgaagcctggctcaggaacccttgtcatcaacatcatgagtgaaggaaaggcggagacctatgaaggggtttaccagtgcactgcaaggaatgagcgcggagctgctgtctccaataacattgttgtccgcccctctaggtcacccttgtggaccaaggaaagacttgaaccaataatcctccgaagtggtcagtcactagtactaccatgtaggcctccaattggattaccaccggccataatattttggatggataactcctttcaaagactgccacagagtgagcgggtttcccaaggactgaatggagacctttacttctccaatgtcctcccagaggacacccgtgaggactacatctgctatgccagatttaatcacactcaaacaattcaacagaaacaacctatttctctgaaggtgatttcagtggatgaattgaatgacactatagctgctaatttgagtgacactgagttttatggtgctaaatctagtaaagagaggccaccaacatttctaactccagagggcaatgaaagtcacaaggaagaattaagaggaaacgtgctttccctggagtgcattgcagaaggcctacctactccagttatttactggatcaaggaagatggaacgcttcctgtcaaccggacgttttatcggaactttaagaaaaccttgcagatcattcatgtctctgaagcagactctggaaattatcagtgcatagcaaaaaacgcattgggagccgtccatcataccatttctgtcacagttaaagcggctccctactggattgttgcacctcacaacctcgtgctttccccaggggagaatgggaccctcatctgcagagctaacggcaacccaaaacccagaattagctggttaacaaatggagtcccagtagaaattgctctcgatgaccccagccgaaaaatcgatggtgataccattatgttttcaaatgttcaagaaagctcaagtgcggtttatcagtgcaatgcctctaacaaatatggatatttactagcaaatgcatttgtaaatgtgctcgctgaaccacctcggattcttacctcagcaaacacactgtaccaggtcattgcaaaccggcctgctttgctggactgtgccttctttgggtctcctatgcctaccattgagtggtttaaaggaactaaaggaagcgctcttcacgaagacatttatgttttacatgataacggaacgctagaaattcctgtggcccaaaaggatagtacagggacatatacttgtgtcgcaaggaataaattagggatggcaaagaatgaagttcacttggaaatcaaagatccaaccaggttcattaaacaacctggatatgcagtcgttcagagggggagcaaggtttcctttgaatgcaaagtgaaacacgaccacaccttaatccccaccattctgtggctgaaggacaatggagagctgcccaatgatgaaaggttctctgtcgacaaggaccatctggtggtctctgacgtaaaggatgaagatggtgggacctacacatgtgcagccaacacaacgctggacagtgtttcagccagcgccgtgctcagggtggtcgctcctactccaactccagcccccatttacgatgtcccgaatcctccctttgatttagaattgaccaatcaacttgacaaaagtgttcagctgacatggaccccaggcgatgacaacaatagtcccattacaaaattcatcatcgagtatgaagatgcaatgcatgaggcagggctgtggcgccaccaggcggaagtttctggaacgcagaccacagcccagctgaagctgtctccctatgtgaactactccttccgagtcatggcggagaacagcatcgggaggagtgtgccaagcgaggcatcggagcagtatcttacaaaggccgcggaaccagaccagaatcccacggctgtggaaggactagggacagagccggacaacttggtgatcacatggaagcccctgaatggttttcaatcgaatgggcccggcctccagtacaaagtgagctggcgtcagaaagatggtgacgatgaatggacgtctgtggttgtggccaatgtatccaaatacattgtttctggcacaccaacttttgtcccatacctgataaaagttcaagccctgaatgatgtgggctttgctccagagccagctgcagtcatgggacattccggagaagaccttccaatggtggctcctggaaatgtgcgtgtcagtgtggtgaacagcaccttggcagaggcacactgggaccctgtacctcccaagagtgtccgaggacacttacaaggctaccggatttactactggaaggctcagagctcatctaaaagaaacagacgccacattgagaagaagatcctcaccttccagggcagcaagactcacggcatgctgccagggctgcaaccttacagtcactatgttctcaatgtccgagtggtcaatgggaaaggggagggcccagccagcgccgacagaggcttccatactccagagggagtccctagtgctccctcatctttgaaaattgttaatcctacactggactctctcactttggaatgggaccctccaagccacccaaatggtatcctgactgaatacatcttaaaatatcagccaattaatagcacacacgaactaggccctctggtagatttaaaaattcctgccaacaagacacgctggactttgaaaaatttaaatttcagcactcggtacaagttctacttctatgcacaaacatcagtgggatcgggcagtcagatcacagaggaagcaataacaactgtggacgaaggtaagaaggctggtattcttccacctgatgtaggtgcaggcaaagcaatggcaagtcggcaagtggatattgcgacccaaggctggttcataggtctaatgtgtgctgttgccctcctcatcttaattttgctaatcgtttgcttcatcagaagaaacaagggtggtaaatatccagttaaagaaaaggaggatgctcacgcagaccctgaaatccagcccatgaaggaggatgacggaacgtttggagaatatagtgatgcagaagatcacaagcctttgaaaaagggaagtcgaacaccttcagacaggactgtgaaaaaagaagatagtgatgacagcctggttgactatggcgagggggtgaatggccaattcaatgaggatggctcctttatcggacaatacagtggtaagaaagagaaagaaccagcagagggaaatgaaagctcagaggccccttctcctgtcaacgcaatgaactcctttgtttaagtctttaagctctgtgccaatgtcccatctctctggaatggttttcctgaacacttgtcatccctctcatactatggacatatgggtagaaagaatgttttctgcggtatatgagtattataagaacagagcaagaacataactcagtcagatgatacgttaatatgaactggggtgaaaaggcatactttttgttcagagtgggttttctcaatttccttggaactgattaaaaagaactacaacatcatcaatagcttacattattccctgtgcaggatacagttcaataagatgcatgaaacatgctgcacagaggacatagctgtgtatgtgattgcgacgtggttgggtacttcgttgacactatcctcagctgaaccctaaatatgaatt

SEQ ID NO: 3377 - DNA, 1830 bp, Rattus norvegicus
  Genbank Accession No. U81186
tggcgagttatggagcgcgctctcccggcggccggcttcctatactgggtgggcgcgagcaccattgcttacctgaccctgcgagcctcgtactcgctcttcagggccttccaggtgtggtgcgtgggcaaccaggcctttgtcggcccgcggctcggagaatgggcagttgttacaggtggcactgatggaattggaaaatcatatgcagaagagttagcaaagcgtggaatgaagattgtcttgataagcagatcccaggataaactgaaggaagtttccaacaacatcaaagaaaaattcaacgttgaaacaaggaccattgctgtcgacttttcattggatgatatttatgataaaattaagacaggcctgtctggtcttgaaattggcgttttagtgaacaacgtgggcatgtcatacgagtatccagaatactttttggaaattcctgacttggacaacaccatcaagaaactgataaatattaatgtgctttccatttgcaaggtgacacgcttggtgctgcctggcatggtagagagatctaaaggggtgattctcaacatctcctctgccagtggcatgctcccggttccactgttgacagtctactctgcaaccaaggcctttgtagatttcttctctcagtgcctccatgaggagtataagagcaagggcatctttgtgcagagtgtcctgccattctttgtatctacaaaactggcaaaaatacggaagccgactttggataagccctctgcagagacatttgtgaagtctgcaattaaaacagtaggtctgcagacccgaaccactgggatatgtgatccacgccatcatgggctcaataaactcaatcttgccccgttggatttattttaaaacgatcatgggtttcaacaagtctttgcggaatcgctatctgaagaaaaccaagaagaactaagttctgctgggtcatcgagctccttggccagacgcttgacctgtgcttgcatactgggcccctgcctgtccccagagtctctactgtcatctcagtaattactaacatggcatagctggcggaaagcaaattccttttagaggttcctaacatatattctggatacaaccaggagtaatttgaagtttaatataaatgttcttggcaaatgtatgtataccactttgacagaaaggaacagatcccagaatgacagacgtagcacccatccggcccagaatgccaatgattacctaatatttggtctggaacctactataaagtgtaatagctagctacttttttatttttaacattaaagggaatggggcttagttgattttttttttatgggcagatacaatgcagtttacattgatttctgtaaggttttctaaaggtatgttccagcttatgtgtttctatggaactggtcttcttaaaagtagctaagaaagacataaagagaattgaaacacggagttctttctaacacagaagtccacaaaatgttattcttggaacacacattatgtctgctctgttccatgtatgtaaatactgaatgctatatagtgtgactgaaatgtaaaggtaagtgggcccaagtgtacatcaagaccagcaacatcctgtggtactgtgggatccagaagagcagcctgcctggatatccagtgttggtcatgtctgtactgcacccatactatttgcctaggatgacagactccttctgtggtagtgaggggtcatggaaacatgttctttttaagttggtgtctcatttgaattcatatatccacttttaataaaagatgatgtaaccgcaaaaaaaaaaaaaa

SEQ ID NO: 3378 - DNA, 3166 bp, Rattus norvegicus
  Genbank Accession No. U83883
ccgtgcaacggggcatcgtcaagatggtcctctctgggtgtgccatgattgtccgagggctgccccgtggtaccgctccagagaggcagatcaacctcagcaacattcgagctggaaatctcgacacacgtcgtcgagctgctacacaaccagatgggaaagataccccagatgagccctgggcatttcctgctagagagttccttcgcaagaagctgattgggaaggaagtctgtttcacgatagaaaacaagactccccaaggacgagagtatggaatgatctaccttggaaaagatactaatggggaaaacattgcagagtcgctagtcgcagaaggcttggctcccggagagagcatgagagccaataatccagagcagaaccggctttcagaatgcgaggaacaagcaaaggcatcgaagaaagggatgtggagtgaggggacgggtcacacacatccggacctcaagtacaccattgagaacccaaggcactttgtggactcacaccaccagaagcctgtcaatgctatcattgagcatgttcgagacggcagtgtggtccgggccctgctccttccggatcactaccttgttaccgtcatgctgtcagggattaagtgcccaacctttcgtcgagaaacagatggtagtgaaacaccagagcccttcgctgcagaagccaagtttttcacggagtctcgactgcttcagagagatgttcagatcattctggagagctgccataatcagaacattctgggcaccatccttcatccaaatggtaacatcactgaactcctcctgaaggaaggttttgcccgctgtgtggactggtcaattgcagtttacacccggggtgcagaaaagctgagggcagctgagaggtttgccaaggagcgtaggctgagaatatggagagactatgtgcctcctactgctaatttggaccaaaaggacaagcagtttgttgccaaggtaatgcaggttttgaatgctgatgccattgttgtgaagctgagttctggagactacaagaccatccacctgtcaagcatccgaccaccaaggttggagggagacaacatacaggataagaataagaagctgcgtcccctgtatgacatcccctacatgtttgaggcccgggaattccttcgcaaaaagctgattgggaagaaggtcagtgtgactgtggactacattagaccagccagcccagccacagaaacagtgcctgccttttctgagcgtacctgtgccacagtcaccattggaggaataaacattactgaggcccttgtcagcaaaggcctagccacagtgatcagataccggcaggatgatgaccagagatcttcacactatgatgagctgctggctgcagaggccagagcgattaagaatggcaaaggattgcacagcaagaaggaagtgcccatccaccgagttgcagacatttctggggacacccagaaagcaaagcagttcctgccctttcttcagcgcgcaggccgttctgaggctgtggtggagtatgtcttcagtggctctcgcctcaagctctacttacctaaggagacctgtctcatcaccttcctgctggcaggcattgaatgtcccagaggagcacgaaatctcccaggcttggtgcaggaaggagagccattcagtgaggaagccacacttttcaccaaggaactagtgctgcagcgagaggtggaggtggaggtagagagcatggataaggctggcaacttcattggctggctacacatggatggggctaacctgtctgtcttgctggtggagcacgcgctctccaaggtccacttcactgctgagcgcagcggctactataagcctctcctgtctgctgaggaagctgccaagcagaggaaagagaaggtctgggcccactatgaggagcagcctgtggaggaggtaatgcctgtactggaagagaaggagcgctcggccagctacaagccagtgtttgtgaccgagatcacagatgacctgcatttctatgtgcaagatgtggagactggcacccagctggaaaaactgatggagaacatgcgcagtgacatctccagccaccctcctgttgagggtctacgcccacgccggggagagttctgcattgccaaatttgtagatggagaatggtaccgcgcccgggtagaaaaagaggagtcccctgccaaagtgcatgtcttctacatcgactatggcaatagagagatcctgccatccacccgcctggccctaccacctgccttcagcactcgcgtgttgccagctcaagccacagagtatgccttcgccttcatccagtggccccaagatgaggacgctcgcacagatgctgtgacagtgtgtgcggacatccaaaacactcagtgcctgctcaacgtggagcacctgagtgccagctgcccccatgtcactctgcagtttgcggattccaaaggtgatgtggggctgggcctggtgaaggaaggactcgtcatggtagaagttcggaaggagaagcagttccagaaagtgatcacagagtacctgaatgcccaggaatcagccaagagtgccaggctgaacctgtggcgctatggcgacttccgagctgacgatgctgatgagtttggctacagtcgctaaggagaacttgcctggctcccagcaccgatgatgccagaccttctccctctgccaggaagccgttttcaactccagacctggtcgggggagtatagattgggtccagcttgcttcagacagaaacctcctctgtcgcgggtagcattggagctggggtggagagcccaaggcttgctggggcagacccctcagtggtactgccgtccagtctctcccagatgattttgtatttttatttaattgtcttcaaatcaggaaagaaccatgaaagactgtgtgttagtgaagggtataatcgtgacacagaggcagctgtcagctggcacccacctctcccccagaccacccttcttcccaagctctgtccaagtgttgattatgtgacttctgatacatccgttctcaaattccagtgtgcccatatctgcccccacaccagcctgttctgtatttaaagcttttgagacccaataaaatagtacctgctgtctgcaaaaaaa

SEQ ID NO: 3379 - DNA, 2838 bp, Rattus norvegicus
  Genbank Accession No. U87306
  misc_feature (1)..(2838): n = a or c or g or t
atgagggcccggagcggggcgcggggcgcgctgctgctggcgctgctgctctgctgggatccgacaccgagcttagcaggcattgactctggtggccaggcactcccagactccttcccatcagcacccgcggagcagctgcctcacttcctgctggaaccagaggatgcctacatcgtaaagaacaagccagtggaattgcactgccgagccttccctgccacacagatctacttcaagtgtaatggcgagtgggttagccagaaaggccacgtcacgcaggagagcctggatgaggccacaggcttgcgaatacgagaggtgcagatagaggtgtcgcggcagcaggtggaggaactttttgggctcgaggactactggtgtcagtgcgtggcctggagctcttcgggaaccaccaagagtcgccgagcctacatccgcattgcctacttgcgcaagaactttgaccaggagcctctggcgaaggaggtacccttggatcatgaggtccttctgcagtgccgcccaccagagggagtgcctgtggctgaggtggaatggctcaagaatgaagatgtcatcgatcccgctcaggacactaacttcctgctcaccattgaccacaacctcatcatccgccaggcgcgcctctcagacacagccaactacacctgtgtggcaaagaatattgtggccaagcgccggagcacgacggccacagtcatcgtctatgtgaacggaggttggtccagctgggcagaatggtcaccctgctctaaccgctgcggccgaggttggcagaaacgtactaggacctgcaccaacccagccccactcaatggaggtgccttctgcgagggacaggcttgccagaagacggcttgcaccaccgtgtgcccagtggatggagcgtggactgagtggagcaagtggtccgcctgcagcacagagtgtgcgcactggcgcagccgcgagtgcatggcaccgccgccccagaacggaggccgtgactgcagcgggacgctacttgactccaagaactgcaccgatgggctgtgcgtgctgaatcagagaactctaaacgaccctaaaagccgccccctggagccgtcgggagacgtggcgctgtatgcgggcctcgtggtggccgtctttgtggttctggcagttctcatggctgtaggagtgatcgtgtaccggagaaactgccgggacttcgacacggacatcactgactcctctgctgccctcactggtggtttccaccccgtcaacttcaagactgcaaggcccagcaacccacagctcctgcacccatccgcccctccggacctaacggccagtgctggcatctaccgcggacctgtgtatgccctgcaggactctgccgacaagatccctatgactaattcaccccttctggatcccttgcccagcctcaagatcaaggtctatgactccagcaccatcggctctggggctggcctggctgatggagccgacctgctgggtgtcttaccacccggtacatacccaggcgatttctcccgggacacccacttcctgcacctgcgcagcgccagccttggttcccagcacctcctgggcctccctcgagaccccagcagcagtgtcagtggcacctttggttgcctgggtgggaggctgaccattcccggcacaggggtcagcctgttggtaccaaatggagccattccccagggcaagttctatgacttgtatctacgtatcaacaagactgaaagcaccctcccactttcggaaggttcccagacagtattgagcccctcggtgacctgcgggcccacgggcctcctcctgtgccgccctgttgtcctcactgtgccccactgtgctgaagtcattgccggagactggatcttccagctcaagacccaggcccatcagggccactgggaggaggtggtgactttggatgaggagactctgaacaccccctgctactgccagctagaggctaaatcctgccacatcctgttggaccagctgggtacctacgtgttcacgggcgagtcctactcccgctccgcagtcaagcggctccagctagccatcttcgccccagccctctgcacctccctggagtatagtctcagggtctactgtctggaggacactcctgcagcactgaaggaggtcctagagctggagaggactctgggtggctacttggtggaggagcccaagactttgctctttaaggacagttaccacaacctacgnctctccctccatgacatcccccatgcccactggaggagcaaactactggccaagtaccaggagattcccttctaccatgtgtggaacggcagccagaaagccctgcactgcactttcaccctggagagacatagcctagcctccactgagttcacctgtaaggtctgcgtgcggcaggtagaaggggaaggccagattttccagctgcacaccacgctggctgagacgcctgctggctccctggatgcactctgctctgcccctggcaatgctgccaccacacagctgggaccctatgccttcaagataccactgtccatccgccagaagatctgcaacagcctggacgcccccaactcacggggcaatgactggcggctgttggcacagaagctctccatggaccggtacctgaactacttcgccaccaaagctagtcccacaggcgtgatcttagacctctgggaagctcggcagcaggatgatggggacctcaacagcctggccagtgccttggaggagatgggcaagagtgagatgctggtagccatgaccactgatggcgattgctga

SEQ ID NO: 3380 - DNA, 2118 bp, Rattus norvegicus
  Genbank Accession No. U87627
aggatgagcagtgactactcgtacaccgctaggatgttgggcaaaggggcactgatgacactaccaaggtgaaaccagccctcctggccatgggaggagctgtggtggacgagggtcccaccggcatcaaggcccccgatgggggctggggctgggccgtcctctttggctgtttcatcatcacgggcttctcctatgccttccccaaagcggtcagtgtttttttcaaggagctcatgcatgagtttgggattggctacagcgacacagcttggatctcctccatcctgctggctatgctgtatggcacaggcccactctgcagtatgtgtgtgaaccgctttggctgccggcccgtcatgcttgtgggtggcctctttgcgtccctggggatggtggctgcatccttctgcagaagcattatccagatctacctcaccacaggggtcatcactggcttgggtctggctctcaacttccagccctccctcatcatgctcaatcgatacttcaacaagcgccgccctatggccaatgggctggcagcagcaggcagtcccgtgttcctttgtgcactgtctccactggggcagctgctgcaggaccactatggctggcggggtggcttcctcatcctgggaggcctgctgctcaactgctgcgtgtgtgctgcactcatgagaccactggtagcaccccaggcgagtggaggggctgagccccatggaccccagcggccgtctccgcgcctgctagacctgagtgtcttccgagaccgtggcttcctcatctatgctgtggctgcctcaatcatggtgctggggctctttgtgcctccggtctttgtggtgagctatgctaaggatatgggtgtgcctgacacaaaggctgccttccttctcaccatcctgggcttcatcgacatctttgccaggcccacggcaggtttcataacagggctcaagaaggtgcggccctactctgtctacctcttcagctttgccatgttcttcaatggcttcactgacctgacaggctccacggccagtgactacggtggcctggtggtcttttgcatcttctttgggatctcgtatggcatggtgggagcgctacagtttgaggtgctcatggctatcgtgggcactcaaaagttctccagtgccattggtctcgtgctgctgttagaggctgtggctgtgctcatcggacccccatcaggaggcaagctgctggacgcaacgaaagtttacaagtatgtgttcatcctggcgggggctgaggtgctcacctcctcccttgtgctgctgctgggcaacttcttctgcatcgggaagaggaagaggcccgaggtgacaaagcctgaggaggtggcctcagaggaggagaagctccacaagccccctgtggacgtgagggtggactcgagggaggtggagcacttcctgaaggcagagcctgagaaaaacggggaggtggttcataccccggaaaccagcgtgtgagcggcctggccgggcgggcagggagcagggaagaggtccagagactggcaacgctcatatttatttcacaaacaggaccagctgaggcggggccatcggctcagctcttggctgcctggtcagcgggtcagtgttttgcggggagaggtggcggggtgggaaccgcgtcattccaaagtggatctgcggtgaagccaaggaagccccacagttaccagccgcctataaccagggacccagcctgctgagcccaagcagcctgtggctcccccgcccccaccactgtggccaaggacctagaaacccacacttaggagacaacacgactttaatcagagggcagggctgggacaggctggcaggtgggcactgcctgcagggtcctccctgatccccaccatcctacccccaacttcagccccagtctcctatattgccaatcctccatatctctgtctaggggacaaagaactccttctacctgagaaggcagagatagacatctctgtgggaggatcaccaaagggcctgtctctaggagctgtgtggtttctgggcagtggtctgttcaccctgagtcccacctttgttaaataacaaactcctgattctt

SEQ ID NO: 3381 - DNA, 2837 bp, Rattus norvegicus
  Genbank Accession No. U88324
gaattcggcacgaggtggaaagcactgagacgtgaagatgagtgaacttgaccagctgcggcaggaggccgagcaactgaagaaccaaattagagatgcccgtaaagcatgtgcagatgcgactctttctcagatcacaaacaacattgatccagtgggaagaatccaaatgcgaaccaggagaacactgagggggcatctggcaaagatttatgccatgcactggggcacagactcaaggctccttgtcagcgcctctcaggatgggaaactcatcatctgggacagctataccacaaacaaggttcatgccatccctctgcgctcctcttgggtcatgacctgtgcatacgctccttctgggaattatgtggcctgtggtggcctggataacatctgctccatttacaatctgaaaactcgtgaaggaaatgtgcgtgtgagtcgtgagctggcaggacatacaggttatctatcctgttgccggttcctggatgacaatcagatagttaccagttctggagacaccacatgtgccctgtgggacatcgagaccggccagcagacaaccacgtttactggacacactggagatgtcatgagcctgtctcttgctcctgacaccagactgtttgtctctggtgcttgcgatgcttcggtcaagctctgggatgtccgagaagggatgtgccggcagacctttacaggacacgagtctgacatcaatgccatatgtttctttcccaatggcaatgcctttgccactggctcagacgatgctacatgcaggctgtttgaccttcgtgcagaccaggagctcatgacctactcccatgacaacattatctgtggtatcacatctgttcccttctccaagagtggccgcctcctcctcggtggctatgacgacttcaactgtaatgtctgggatgcactcaatgctgacagagcaggtgtcctagctggacatgacaaccgagtcagctgcttgggggtgactgatgatggcatggctgtggcaacaggatcctgggacagcttcctcaagatctggaactaaggccacagcaggtggatggatgccatggcgactggaagaccattccaaccttgaagcgttactgcgatagcatatcctatccaaccatactaacgtggacacccacacctcccctcagaacttcaaaagggcaagatcttttttccttcacttattgctgaaaccaagagcacaactcccattaagagaaggatctctgtgctgtaaactaaaacaaattgtgcatttttctggggccattgtctttggtttattttgttttgttttttgtttttgttttgtttgtcttgggcaaatttttaaaggaaatactacaataaaaatgttaaccagaaggtaaccctgagtatgattgtgagagagacacaccttcttactagttcatttgcatttaaatcagtgatcctgatctgtggcaatcatgaaaaacaagttgaagactttgtttatctggaattgtttctaaatataagtcatttgtagcaagactttggaagcattcacgtttcttccttaaacatattcctttatgttcagtagttaagagaaccagagcccatgggggtgtctgactgtcactgatgcatttttgtccctggcttgcttttttttttttttttttttttttgtctcatgtcacagatgactgtttcgcacaaacacagcatagtggaagaaaaaattcagaagcaaagtagccaagcacatgttatgatggccacgaatgcttggtcagaatccttccctttgctcagcagtgaacttattcccagcacccttccctcctcactgtccagtttctgttctttccttgggtttcctgtgaagttggagggaagtttgtagtcatgtgacactagccgtcctgcccctgctgtcagattttttttctccagagaggtgcctgtcctgtgcttggatagtcagtttgtgtatgaaacaatgtacaaatcaatgttttgaaaataatgatctcagactttctaagttaaattttaaacaatttgattgtttgccatattgggtgggtttactcttagaatcgcatgctgtagaaatgctctaaagtgcatataggactcagtccttagatgttctttttattttaagaaataacctcttcaagttgtaaccgtggcggctttgtccattactgttgctattctgcacacatatcggaagcagcaagcgctttacacactcgagtagtgggataagtcactgttttctttactttacaagatgatagtcctgttgggaatgactgctgctggcttcaggaagggagggaagctgctccgctgcctctttgccacttcctggaagcagcctccatggaacagcctttgcatctgaggcaaccatttttacaccgtgcagatcttcgtggttatcatctcaaagccatgttcagcagcagcgtttggacagcagtgttctgtgggccctcccatcccccgatatcctgcacccctcatagcagtagtggcttcgccattctgttttctgcagcgtcctgtacaaaactgtgctgtgactgtgcggtaggcctggacatggcaaagagaatacagcgaagccccttctcttcctaccaaacgactctgtagagctctctgcaccctgtaccctttccaccttttgtatttaattttaaagtcagtgtactgcaaggaggctggatgcaagatagatactatattaaactgtactgttatttaagatgtaataaagcagtttgacatgaggaaaaaaaaaaaaaaaaaaaaaaaaaaaa

SEQ ID NO: 3382 - DNA, 1547 bp, Rattus norvegicus
  Genbank Accession No. U89280
  misc_feature (1)..(1547): n = a or c or g or t
ccggaaagaacaaacagggcagaagaaaggtgatttcctctttcctaaacctggaacactttaattctgtccacaagggcagagtggtgaactcccagcaatctaggactcaacctttagcctttagcctcactctgagggttatggtgatcaattttcctggatctgaagacttggacatggactgagacctcagttacagacagcctgttgtgagacttctcagcctctatgattactgctcctggacattccctcataatgtggttttacctggtgactcttgtgggcctttactaccttctgcgttggtatcgtgaaaggcaggtggtgagccatctacatgacaagtatgtcttcatcacgggttgtgactctggctttgggaacctgctggccagacagctggacaggagaggcatgagggtgctggctgcatgtctgactgagaagggagcagaggagctgaagagcaagacatctgacaggctggagacagtgatccttgacgttaccaacacagacagtatttcagcagccactcagtgggtgaaggagcatgttggagacaaaggactctggggtttggttaataatgcaggtgtgtttcaagcatttgcctacattgagtggtgccgaccggaggactgcatgtctatctttcaagtgaacctcattggtttggcacaggtgactctgagcatgcttttcctggtaaagaaggctcggggcaggatcgtcaacgtctccagtgttttgggaagagttgcattgtttggaggattctacagttgctccaagtatggagtcgaggcattttcggacgtgctaagacgtgagattcgagattttggggtgaaagtcagcataattgaacctggaagcttcaaaacgagaatgactgacgcagagctaagcattgagaaaaccaagaaaacctgggaggcgacccctgagcacatcagggagtcctacggacagcagttttttgatgacttttgcaacaccaccagacgagaactgaagaagtgcagcacgaacctgagcctggtcacagactgcatggagcacgctctgacctctaagtatcctcgcacccggtactcagctggctgggatgccagacttttcttcatccctctgtcttatttgcctacatcactggtagactgcctactggccatatctaggcgcaagccagctcaggcagtctgaaggatcctgggtcggcggctctgggaatgaanaaacaactcagttattcccagctcaagctgtgtgcgctgacatactttcttgcctaaaccacgtatgggctgtcttttcctcttctacacccacaggcacctggcctcgctctataaccctggctggcagcaaactcatagaaaacgtctgtctctctcttaatcaaggcgtttgcattccaggcgtacaaaacttagtactaacttagccactttttcctggggatatttccatattgtgttattctttcttgtcctattaaaaagtatcccatataagaacaaaaaaaaaaaaaaaaa

SEQ ID NO: 3383 - DNA, 1114 bp, Rattus norvegicus
  Genbank Accession No. U89745
  misc_feature (1)..(1114): n = a or c or g or t
tcagtnatcggccgaattcgcggccgctccggcctccactgttttgtcagtcagttagggggtgggcccaaccttagagatgggggcccggccttcactgttctgttattcagagggtggggcctgacctccacttttctgttattcagggggcagggcctgacctccacttttctgttattcagggggcagggtctgacctccactgttctgtcagtcatttggggggcggggcctggtggagctataatgcctgttcctgaggtggccctgcccagtccagcactggactaaccacaggccaagtgctgagtaactaagacccaggcctgctgggtgaggggttccgagaactcatgaacctctgtcctgcctctgagggactttgaagattgttgccctgcagtgtccctagcagttaaacccagccgccatgttcaagaggtttccccttagctgctgtgcctctctgggctgggcgggtggtttaaagcatgcatcaccaaggagccagtgtgtcctttgcttggctggacccagcctctgcttctgctccgtcctgggaatgcatctccttatatcactttcctctttcagaaccagaaggacctgggcctgcctgaaagctgggccgtccttgtttgtgctcctgccggggcccagtctctggaaggtggccttgagttaggcatccttggttgaatcctgtcccactgaacaggtgttaactttgaaccacactcactctgagccttggcttccctttctgtaaaatgggggtractgagccaaggstgcttgtgggaggracacacaggcstgaggstggccctgtgagcstgtgcctttccttccctccctgtgaggtcttggggaggagccytgctggtgcacatgtccttatccctctcbcggataatacacacatttgtaggkncgggcgcattyttacacacacacacacacacacacacacacacacacacacacaccccamtnatcagtgtctkgtgttcatwtcccagntacacacattccctgtgcccacccacactcacacaggatnccttgctctttaaactacaaccccacacagtcccctgcacaccccaaa

SEQ ID NO: 3384 - DNA, 4413 bp, Rattus norvegicus
  Genbank Accession No. U90725
  misc_feature (1)..(4413): n = a or c or g or t
ggcgtcttgttcctgtttcgccacagttcctaccttatgagcttggattcctcacgctaataaaagaggagcagtaaaagctggcaggctgacagaggcaacctcaggacggactttctggctactgaccattttgctgtgtcttactaggattgtgtgtggacgtgagatcaaccatgagctccgttgcagttttgacccaagagagttttgctgaacatcgaagtgggctggttccacaacaaatcatagttgccacattaaattcagaagaagaaagtgaccctccaacctacaaggatgccttccctccactgcctgagaaagcagcttgcttggaaagtgcccaagaacctgctggagcctggagtaacaagatccggcccatcaaggcctctgtcatcactcaggtgtttcatgtacccctggaggagagaaaatataaggacatgaaccagtttggagaaggtgaacaagcaaaaatctgccttgagatcatgcaaaggactggtgctcacctggagctctctctggctaaagaccaaggtctctccatcatggtctcagggaagctggatgcagtcatgaaagcccggaaagacattgttgctagactacagacacaggcctcagccactgttcccattcctaaagagcaccaccgctttgttattggcaaaaacggagaaaaactacaagacttagaactgaaaactgctaccaaaatccagatcccacgcccagatgaccccagtaatcagatcaagatcactggcaccaaagaaggnatcgagaaagctcgccatgaggtccttctgatctctgctgagcaggacaagcgtgccgtaaagaggctagaagtggagaaggccttccaccccttcatcgctgggccgtacaatagacttgtgggtgaaatcatgcaggaaacagggacgcgaatcaacatccctccacccagtgttaaccgtacagaaatcgtcttcactggagaaaaggaacagctggctcaggctgtggctcgtattaagaagatttatgaggaaaagaagaagaagactacgaccattgcggtagaggtgaagaaatctcaacacaagtatgtcatcgggccgaagggcaactcactgcaagagatcctggaacgtactggagtctccgttgagatcccgccctcagacagcatctccgagactgtgatacttagaggcgagcctgaaaagctgggacaggcattgactgaagtctatgccaaggccaacagttttacagtgtcctcagtctctgccccttcctggcttcaccgtttcatcattggtaagaaagggcagaacctggccaaaatcactcaccaaatgccaaaggttcacattgagttcacagaaggtgaggacaagatcaccctggagggccccacagaagatgtgaatgttgcccaggaacagattgaaggaatggtcaaagacctgattaatcggatggactatgtagaaatcaacattgaccataaattccacagacacctcattgggaagagtggagccaacatcaacagaatcaaagaccagtacaaagtgtctgtgcgcatcccccctgacagcgagaagagtaacctgatccgaattgagggagacccacaaggtgtgcaacaggccaagcgggagctgctggagcttgcttctcgcatggaaaatgagcgcaccaaggatctaatcattgagcaaagatttcatcgcacaatcattgggcagaaaggtgaacggattcgagaaattcgtgacaaattcccagaggtgatcatcaactttccggatccagcacaaaagagtgagattgttcaactcagaggccccaagaatgaggtggagaaatgtaccaagtacatgcagaaaatggttgcagatctggtggaaaatagctattcaatttctgtaccgatcttcaaacagtttcacaagaatatcattgggaaaggaggtgcaaacattaaaaagattcgtgaagagagcaacaccaagattgaccttcctgccgagaacagcaactcggagaccattgtcatcactggcaagcgagccaactgtgaagccgcccggagccggatcctgtccatccagaaagatctggccaacatagctgaggtggaggtctcaatccctgccaaactacacaactctctcattggcaccaagggtcgtctgatccgctccatcatggaggaatgtggtggcgtccatattcactttcctgtggaaggttctggtagtgacactgttgtcatcaggggtccttcctcagatgtggagaaggccaagaagcagcttctgcacctggctgaggagaagcaaaccaagagttttactgtggatatccgggccaagccagaataccacaaattcctcattggcaaagggggaggtaaaatccgcaaggtgcgcgacagtactggagcccgcattatatttccggctgctgaggataaggaccaggacctgataacaatcataggaaaggaagatgctgtccgtgaggcacaaaaggagctggaagcattgatccagaacctggataatgtggttgaagactacatgctggtggaccccagacaccaccgccattttgttatccgaagaggacaggtattacgagagattgctgaagaatatggcggggtgatggtcagcttcccacgctctggcacacagagtgacaaagtcactctcaagggtgccaaagactgtgtggaggcagccaagaagcgaattcaggaaatcattgaggatctggaagctcaagtaacgctggaatgtgctataccccagaagtttcatcgttcggtcatgggtcccaaaggttcaagaatccagcagatcactcgggactacaatgttcaaattaagttcccagacagagaggaaaacccagttcacagtgtagagccttccatccaggagaatggagatgaggctggagagggcagagaggccaaggagaccgacccgggatctcccaggaggtgtgacatcatagttatctctggccggaaagagaaatgtgaggctgccaaggaagccctggaggcactggttccagtcaccatcgaggtagaggtaccctttgatcttcaccgctacatcattgggcagaaaggaagtggaatccgcaagatgatggatgagtttgaggtgaatatacatgtgccagcccccgaactgcagtcacacaccattgccatcactggccttgcagcaaatttggacagggctaaggcggggctactggatcgagtaaaggagctgcaggctgagcaggaagatcgggctttaaggagttttaagctgagtgtcactgtagaccccaaataccatcccaaaattatcgggggaaaaggggcagtgatcacacagatccgattggaacatgatgtgaacatccaatttcctgataaggacgatgggaatcagccccaggaccaaatcaccatcacagggtatgagaagaacactgaagctgcccgtgatgctatcctgaaaattgtgggtgagcttgagcagatggtttctgaggatgttcccttggatcaccgtgtgcatgcccgaatcattggtgccagaggcaaagccatccggaaaatcatggatgagttcaaggtggacattcgcttcccacagagcggagctccagaccctaactgcgtcactgtgacaggactcccggagaatgtggaggaagctatcgaccatatcctcaacctagaagaggaatatctggctgatgtggtggacagtgaggcgctgcaagtttacatgaagcccccagcacatgaagagtccaaggcaccatccaaaggctttgtggtgcgagatgctccctggacctccaacagcagtgagaaggctcctgatatgagcagctctgaagaaattcccacctttggggctcaagtggcccccaagaccctcccgtggggccccaaacgataatgatcaaaaagaaactttccagcctgctgcccaaacccaaccacacaatggtttgtctcaatctgactcagcagctggaccctcgtaaattgttgatgctccccctccccgaagtctcgcagcaaagcctggtgggctggccttctgtggctgcttcccctggcctggtcagcacccgcaggctcagggtctgctcctgacgctgtgctctgggaaagtgcacgccactgcgtgaaacactaagcaaggtaatcgagcatttcgtgatcacagactccagcttcctggtccacccagcatgtagtcagcattctgactttcacagcagagttccacagcggctaggagttgacttccttgtgtcatgacctcaggaaataaatttccttgactttataaaagccaaaaaaaaaaaaaaaaaaaaaaaaaa

SEQ ID NO: 3385 - DNA, 1752 bp, Rattus norvegicus
  Genbank Accession No. U91679
tttgttttaacaaacatgtttattagaaaagtaaaaatattgcataggtcttagtacttgaacatcaagtgtattcatgaaccgtgagtatcttcatgtaaacagttctagatggaagacccaggtggcgctcctctgggggagagggttccagccccccacccccctcagccccatcccctcacagctcactcctccagtacaccggcaccgggatgggctgggatgcagctccaggaccccctccctcctcaccacaccctggctgcccgctcccgccaggccttgccggacccggcggcgtctactcttccctgtcacccacagtcaccacgggcgggtatcggcaccccaagcgcaaagctgacgtgcccccccgtgcggtcccccccatctcccaccgcccagtccccggcagcgatgagacagagcggcacctcccagcccctgctgatcaacatgtacctaccagatcccgtcggagatggtctttttaaggaagggaagagcccgagctgggggccgctgagccctgcggtacagaaaggcagcgggcagatccagttgtggcagtttctactggagctgctggcagaccgcgcgaacgccggctgcatcgcgtgggagggcggccacggcgagttcaagctcaccgaccccgacgaggtggcgcgacgctggggcgagcgcaagagcaagcccaatatgaactacgacaagctaagtcgagcactgcgctactactacgacaaaaacatcatgagcaaggtgcacggcaagcgctacgcctaccgctttgacttccagggcctggcacaggcttgccagccaccacccgcgcacgcccacgccgccgctgccgccgccgcagcggcagccgccgcccaggatggcgcactttacaagctcccggctggtctggctccactgcccttccccggcctctccaaactcaaccttatggcagcctcggccggcgtggcgcccgctggcttctcttactggcctggtcccaacgccaccgccgctgccgccgccaccgctgcgctctacccaaccccgggcttgcagccccctcccgggccctttggcgcggtggccgccgcttcgcacttggggggtcattatcactagacgggacggccgggtgcagtggggcctctcccacacagccagtgaccaatcccatcctcatcctgggaggagccccgaagatttccccgacgttcctttaccacagatttcgttgcagcagccgctcccagcccagggaagaaaggatgggaagcctctgaggtcttccttgaatacgaggcttccaggctcccattatcatcaccccaggaagggtgcatgtgctcccactttaatttttctcttccaagtctccagattctggaactcccgtcttttttttctcttctcacctggagcccctgccttcctctttatgacccctagttttctgttttgttttttttttttcctctctctctcctcattttttttctctcccacgacctactccaaacggtagtacctcggtagtacctcgaggcttctcacactccccttttcgggatatgagaagcatcaaaaacatctctgctgttgtccatccctatcccaacactctggcttcgctcccttccataccacactctggcccaaggaccctcgtctgtatatattcctttcagccccattaaagatccaagcttcaaaaaaaaaaaaaaaaaaaaaaaaaaaaaa

SEQ ID NO: 3386 - DNA, 793 bp, Rattus norvegicus
  Genbank Accession No. U92699
aacaccaaatggcggatgacgccggtgcagcgggagggcccggaggacccggggctcgtggaggtaaagctgaagacaaggagtggatccccgtcaccaagctgggccgcctggttaaggacatgaagatcaagtccttggaggagatctacctgttctccctgcccattaaggagtctgagattattgactttttcctgggtgcatctctaaaggatgaagttctgaaaatcatgccagtgcagaagcagactcgggctggccagcggaccaggttcaaggcctttgtcgctattggggactacaatggccacgttggtcttggtgttgagtgctccaaggaggtagccactgccatccgaggggccatcatcctggccaagctttcgatcgtcccagtgcggagaggctactgggggaacaagattggcaagccccacactgtgccatgcaaggtgacaggccgctgtggctctgtgctggttcgtctcatccctgcccccagaggcactggcattgtctctgctcctgtgcccaagaagctactgatgatggctggtatagatgactgctacacttcagccaggggctgcactgccaccctgggcaactttgccaaggccacctttgatgccatctccaagacctacagctacctgacccctgacctctggaaagagactgtgttcaccaagtctccttatcaggaattcactgaccatcttgtgaaaacccacaccagagtctctgttcagaggacccaggctccagctgtggctaccacataagggtt

SEQ ID NO: 3387 - DNA, 1053 bp, Rattus norvegicus
  Genbank Accession No. U94856
ggactggtgttggcactttacaagaaccatcggtcttcctatcaaacaagattaaatgctttccgtgaagtaacaccggtagatcttcctaactgtactttagttaaaggaatcgaagcgggtgctgaagacttagagattctgcctaatggactaactttctttagcacatttttaaagtatcctggaataaaaagtttcgatcccagtaagcctggaaaaatacttctgatggacttgaatgagaaggagccagcagtgtcagaattagcaattatgggaaatacgttggatatgtcttcatttaacccacatgggattagcacattcatagatgaagataacactgtgtacctactggtggtaagccacccagactcctcgtccaccgtggaggtgtttaaatttcaagaagaggaaagatcacttttgcatctgaaaaccatcacccatgaacttctgcctagcatcaacgatatagctgctgttggacctgagagcttctatgccacaaatgatcactattttgctgacccatacttacggtcctgggaaatgtacttgggcctgtcatggtccaatgttgtatactacagtccagataaagtccgagtggtagcagatggatttgatttcgctaatggcattggcatttcccttgatggcaagtatgtctatatcgctgaattgctggctcacaagattcacgtgtatgaaaagcatgctaattggactttaacgccattgaaggtcctcagctttgacacccttgtggataacatctctgtggatcctgtgacaggggacctctgggttggatgccatcccaatgggatgaggatttttttctatgactcggagaatcctcctggctcagaggtgcttcggatccagagcattttatccgaagaccccaaagtaactgtagtttatgcagagaatggcacggtgttgcaaggtacgacagtcgctgctgtgtacaaaggaaaactgctgattggaacggtgttccacagagctctttgttgttacctgtgacaagctggctacacc

SEQ ID NO: 3388 - DNA, 405 bp, Rattus norvegicus
  Genbank Accession No. U95052
taatacttgagttgttgcaatatttgattatccatttggttgttacagaaaaattcttaactgtaattgatggttgttgccgtaatagtatattgcctgtatttctacctctagtaatgggctttatgtgctagattttaatatccttgagcctgggcaagtgcacaagtctttttaaaagaaacatggtttacttgcacaaaactgatcagtttgagagatcattaatgcccttgaagtggtttttgtgggtgtgaaacaaatggtgagaatttgaattggtccttcttattatagtattgaaattaagtctacttaatttatcaagtcatgttcatgccctgattttatatacttgtatctatcaataaacattgtgatacttgatgtagttgtaaaaaaaaa

SEQ ID NO: 3389 - DNA, 891 bp, Rattus norvegicus
  Genbank Accession No. U95162
gaattcggcacgagcgccgttgcagctatggccactgctctaggatttcgctgcctttaccgaacgcgacctgcgacgctcggtcggtacgtcgataggctgtggaggagcccgagtcgggggcaccggctttctccggctgacgatgagttataccagcggacgcgtatctctttgctgcaaaacgagttccctcaggccgtatacatcgacagctacaatagcagaggtttcactatcaacggaaaccgcgtgtttggaccttgtgcgctgctcccacagaccgtggtccagtggaacgtgagccctcccctacactgcaatttatacgtagtgccaaaagccactccctcttagcaaatttagctttattgtgccgctgagtaaagcgtgtatagatttgacgtgttgaatggcccctgcttccatacagacaggtgggatctcatcaggatatcactgaagagagcttctcgattttctggatgctggaacctaggataggtatggggcagagggagcactgggtcctattagagattgttgtggtgggcaccggaaacaagactgagcggctgcactctcaagtcctgcaggccatgaggcagcggggaattgcggtggagatacaggacacgcctaacgcctgtgccaccttcaacttcctgtgccacgaaggtcgagtgacaggagctgccctcatccccccacctggagagactgcacttgcctcttctggtcaaaccacagagtgaaccatccagaacagtcaaggagggcactgagcttcgtgatctccccgtgccttccctactccccctcttggcacactagctgtcatgctcacccaggataataattttatgatcttcttatcaaaaaaaaaaaaaa

SEQ ID NO: 3390 - DNA, 493 bp, Rattus norvegicus
  Genbank Accession No. V01235
ctgttggtggcagctgggaaaggaaacctcattgccaccatgaacttctccggcaagtaccaagtgcagagccaagagaactttgagcccttcatgaaggcgatgggtctgcctgaggacctcatccagaaagggaaggacatcaagggggtgtcagaaatcgtgcatgaagggaagaaagtcaaactcaccatcacctatgggtccaaggtgatccacaatgagttcaccttgggggaggagtgcgaactggagaccatgactggggaaaaggtcaaggcagtggttaagatggagggtgacaataaaatggtgacaactttcaaaggcataaagtccgtgactgaattcaatggagacacaatcaccaataccatgacactgggtgacatcgtctacaagagagtcagcaagagaatttagacaaggctgtatttcatattcttttacagtataaaattaatacaataaagttacctctgttttgaaataa

SEQ ID NO: 3391 - DNA, 2615 bp, Rattus norvegicus
  Genbank Accession No. X00469
catcctccctggggtcctagagaacactcttcagttcagtccttcctcacagccaaagcagccacctagatcatgccttctgtgtatggattcccagccttcacatcagccacagagctgctcttggccgtcaccacattctgccttggattctgggtggttagagtcacaagaacctgggttcccaaaggtctgaagagtccacccggaccctggggcttgcccttcatggggcacgtgctgaccctggggaagaacccacacctgtcactgacaaaactgagtcagcagtatggggacgtgctgcagatccgtattggctccacacccgtggtggtgctgagcggcctgaacaccatcaagcaggccctggtgaaacagggggatgacttcaaaggccggccagacctctacagcttcacacttatcgctaatggccagagcatgactttcaacccagactctggaccgctgtgggctgcccgccggcgcctggcccagaatgcgctgaagagtttctccatagcctcagacccaacactggcatcctcttgctacttggaagagcacgtgagcaaagaggctgaatacttaatcagcaagttccagaagctgatggcagaggttggccacttcgaccctttcaagtatttggtggtgtcagtggccaatgtcatctgtgccatatgctttggcagacgttatgaccacgatgaccaagagctgctcagcatagtcaatctaagcaatgagtttggggaggttactggttctggatacccagctgacttcattcctatcctccgttacctccctaactcttccctggatgccttcaaggacttgaataagaagttctacagtttcatgaagaagctaatcaaagagcactacaggacatttgagaagggccacatccgggacatcacagacagcctcattgagcattgtcaggacaggaggctggacgagaatgccaatgtccagctctcagatgataaggtcattacgattgtttttgacctctttggagctgggtttgacacaatcacaactgctatctcttggagcctcatgtacctggtaaccaaccctaggatacagagaaagatccaggaggagttagacacagtgattggcagggatcggcagccccggctttctgacagacctcagctgccctatctggaggccttcatcctggagaccttccgacattcatcctttgtcccattcaccatcccccacagcaccataagagatacaagtctgaatggcttctatatccccaagggacactgtgtctttgtgaaccagtggcaggttaaccatgaccaggaactatggggtgatccaaacgagttccggcctgaaaggtttcttacctccagtggcactctggacaaacacctgagtgagaaggtcattctctttggtttgggcaagcgaaagtgcattggggagaccattggccgactggaggtctttctcttcctggccatcctgctgcagcaaatggaatttaatgtgtcaccaggcgagaaggtggatatgactcctgcctatgggctgactttaaaacatgcccgctgtgagcacttccaagtgcagatgcggtcttctggtcctcagcatctccaggcttagactgtcctggatgctcaccagactaggtggctgttcctaggattcaacttcagtcagaaacacagaccctggggcattgtgcctgcctcctactttggacttgtttctctatatgctgaacacagacactgggcacagcagagacccacaggaacctcagatccttctcaagttcagcatcaactaggagacctaaaagggttatgagatacctgggcctcagaaaacccctgaagagctctctggtcctccagtggctggctggtttgaaaaatacttacaacaggtcatgctaggatctggctggttactttgacaaccgggagtagcccagaatggagggagaagagaactcaaaatactggcacggaggtgctcttgccatctgctgaggctcaactgtcttccaacatgggtttatgacactacatgtgggggtgtagcaccttcatttaccctacatagaaataaacaaggtctccttgtccttgcaaagcccatgttcctgtttaggaagggctgagagttgtgtgtagaaagacctaagaacatagggacagactttctgggcagtaagaccaggtttagagtaaaggaatgccttttgagacagtattgtgtagtccaagttgcctctgaacttgctaccaagggtggccttgaactccttaattcttttttctgcttttaccaccctaccaagtgctagggtacagtcatgaaccgctacaccagctcttggtctcttgtctttactgtataaaacgtttctttctttcttttttttttaaagaaaatgtttgtgcataagagttttttattgtggcctgtattttgcttatgcatttgtattagtcgtacttcaatagatttagataattcgcttagtgtaatagagaaaaatctaactcaagtatccagaaatatataggaaaaacgtacctgagctaaataaaaatattacctgg

SEQ ID NO: 3392 - DNA, 331 bp, Rattus norvegicus
  Genbank Accession No. X02284
ctgcctgaccactaatccattggagacacccacagtcatgtgtacagttgtcttgtatttttttgtttgtttgtttgtttttttagacctgtcatcatggctcaccgatttccagccctcacctcagagcagaagaaggagctctccgagattgcgcagcgcattgttgccaatgggaagggtatcttggctgcagatgagtctgtgggtgagtgtaagaaagtcatgccacacaaggcacaccgtgcttgcaccttggaaaaggcagttagacaatcagtctccttccacacagaggaagtaaaggtttatgtacttagtgagtgcaggc

SEQ ID NO: 3393 - DNA, 1390 bp, Rattus norvegicus
  Genbank Accession No. X02299
gtgctcctctgctccaggctcctgccaagtttagcgcaggaagaaggcgcccaggaattgaactgcaatgatgagactgtatttcaggctgtggatactgctctgaagaaatataacgctgagttagaaagcggcaaccagtttgtgttgtaccgagtgactgagggcactaagaaggatggcgctgaaacattgtattccttcaagtatcaaatcaaggagggcaactgctctgttcagagtggcctcacctggcaggactgtgacttcaaggacgctgaggaagccgctactggcgaatgcacaacaactttggggaagaaagaaaataaattctccgtagccacccagatctgcaatattactccaggtaagggtcctaagaagacagaggaggacctctgtgtcgggtgtttccaacccataccgatggatagctcagacctgaagcctgttctgaaacacgctgtggagcatttcaacaacaacacgaagcacacccacctctttgctctcagagaagtaaagagtgcccactcacaggtggtggctggcatgaattataaaattatctactccattgtgcaaacaaattgttcaaaggaggattttccttccctccatgaagactgtgtaccccttccctatggcgatcatggtgagtgtacgggtcatacccacgtggatattcataacacaattgccggcttctcacagagctgtgacctttatccaggagatgatttgtttgaactacttcccaagaattgccgtggctgccccagggagatacctgtagacagcccggagctgaaggaggcacttggtcattccattgcgagacttaatgcacagcataaccatattttctatttcaagattgacaccgtgaaaaaggcaacatcacaggtggttgctggagtaatatatgtgattgagttcatagccagagaaactaactgttccaagcaaagtaaaacagaactgacagcggattgtgagaccaaacacctcggtcaaagcctcaactgcaatgctaacgtgtacatgagaccttgggagaacaaagtcgtcccgactgtcagatgccaagcactagatatgatgatttctaggcctccaggattttcacctttccggctggtgcgagtacaagaaactaaagaaggaacgactaggctcctaaactcatgtgagtacaagggcagactctcaaaggcaggggcaggcccagcacctgagcgtcaggcagaagcttcaaccgtgacaccatagcccggcaaagacccggagtggaaggaccagaagactcctgggatgtgtgcagcatggaagcatgtttcttcatcacctgatcctgggtgaaataaagttcagactcgacgagttc

SEQ ID NO: 3394 - DNA, 347 bp, Rattus norvegicus
  Genbank Accession No. X02322
ctttctgcagcagggattcccaaggatgaagctttcagcggaggcttgagccctcggcccccaaacatagctggaccctgttacttctacttcagttctgatcttctccttcctctgtgaatacaataaagacccatctcatctgcacttcagcttccttcattgtcaatctgattgtttttttaaacgtggtttatggttacctctcccaagtagcatgacaaagtataatgatgcagacaggcagagccggagagatggctcagttggtaaggcttttgctgtacaagcatgagaggagctcagaccctagcacccacataaaagccaggctcaggagtgcatgc

SEQ ID NO: 3395 - DNA, 890 bp, Rattus norvegicus
  Genbank Accession No. X02412
gctgaagctgacgtagcatctctgaacagacgcatccagctggttgaggaggagttggatcgggctcaggagcggctggccacagctctacagaagctggaggaggctgagaaggctgcagatgagagtgagagaggcatgaaagtcattgaaagccgagcccaaaaagatgaagaaaagatggagattcaggagatccagctgaaagaggccaagcacattgctgaagatgctgaccgaaagtatgaagaggtggcccgtaagctggtcatcatcgagagtgatctggagcgtgcggaggagagggctgagctctcggaaggcaaatgtgcggagcttgaagaagagttgaaaacggtgacgaacaacttgaagtcactggaggctcaggctgagaagtactctcagaaagaagacaagtatgaagaggagatcaaggttctctctgacaagctgaaggaggctgagacccgggctgagtttgcagagagatcagtaaccaaattggagaaaagcattgatgacttagaagacgagctgtatgctcagaaactgaagtacaaggccatcagcgaggagctggaccacgctctcaacgatatgacttccatataagttctgcttctctcctcccaagactccttcattcaagccggaatgtcccacctctctgagctctgcatctgtctgctctccagctgacccaggtttctttctagtgcccacccaccctagggccagcacagaccgtgctttctattgtacagaggtgatcctcccagtgtaaaataaacactgtacgctagtcctgtttgctattcctctgctccttatttattgacatttttgtctcagcgctcaataaaactacagttctgctttgtgatcta

SEQ ID NO: 3396 - DNA, 1771 bp, Rattus norvegicus
  Genbank Accession No. X02601
aaggaggcagcaaagaacccgctgagagcagtgcagaactgtgggaagccagtggaaatgaaagggctcccagtcctgctgtggctgtgtacggctgtgtgctcatcctacccattgcatggcagtgaagaagatgctggcatggaggttctgcagaaatacctagaaaactactatggtcttgaaaaggatgtgaagcagtttactaagaaaaaggacagtagccctgttgtcaaaaaaattcaagaaatgcagaagttccttgggctgaagatgacagggaagctggactcgaacactatggagctgatgcacaagccccggtgtggtgttcccgacgtcggtggcttcagtacctttccaggttcacccaaatggaggaaaaaccacatctcctacaggattgtgaattatacactggatttaccaagagagagtgtggattctgccattgagagagctttgaaggtctgggaggaggtgaccccactcacattctccaggatctctgaaggagaggctgacataatgatctcctttgcagttgaagaacatggagactttatcccttttgatgggcctggaatggtcttggctcatgcctatgcccctggaccagggaccaatggagatgctcactttgatgatgatgaacgatggacagatgatgtcacaggtaccaacctattcctggttgctgctcatgaacttggccactccctgggtctctttcactcagccaatgctgaagctttgatgtacccagtctacaagtcctccacagacctggcccgtttccatctctctcaagatgatgtagatggtattcaatccctctatggacctcccacagaatcccctgatgtcctcgtggtacccaccaaatctaactctctggaccctgagaccttaccaatgtgtagctctgctttgtccttcgatgcagtcagcaccctgcggggagaagtcttgttctttaaagacaggcacttttggcgaaaatctctcaggacccctgagcctggcttttatttgatctcttcattttggccgtctcttccatccaacatggatgctgcatatgaagttactaacagagacactgttttcattcttaaaggaaatcagatctgggctatccgaggtcatgaagagctagcaggttatcctaaaagcattcacactctgggcctccctgaaaccgtccagaagatcgatgcagccatttctttaaaggaccaaaagaagacgtacttctttgtagaggacaaattctggagatttgatgagaagaaacaatccatggatccagaatttcccaggaaaatagctgagaactttccaggcattggcacaaaggtggatgctgtctttgaagcatttgggtttctttacttcttcagcggatcttcacagttggagtttgatccaaatgcagggaaagtgacccacatattgaagagcaacagctggtttaattgttaagaagatccatggaaggcgtcgtgtgtttcagctgaccctgatagctcttcctctgaaacttggcgcactgaagtggtttccttactctagcatgtgctatggcagagcaaaatgggagctacatatggcaccagtcaacctcaagttgtcgaaggacattcagaagcactgcttgtcttatactgtgtcaaagggagaggagaaaacacactcctgggctacagacaagtaactgtctctgtgtagatggtttgttttatttaataaaatggtgtgtcatttattt

SEQ ID NO: 3397 - DNA, 2362 bp, Rattus norvegicus
  Genbank Accession No. X02741
atcatcagaggacttggtggaggagagcttataggtttggctgctgggaggctgctttgcctggacttggaagattttcctgtaggcttcgagaggcatggactcctacgtgattcagacggatgtcgacgacagcttgtcctcagttctggatgtgcatgtcaatattggtgggagaaactcggtacaaggaagaaagaaaggcaggaaggccagatgggacgtgagaccctctgacatgtccaataagaccttcaatcccatccgagccatcgtggacaacatgaaggtgcagcccaatccgaacaagaccgtgatttctctgtcaattggggaccctactgtgtttgggaacctgcctacagaccctgaagttacccaagccatgaaagatgccctggactcggggaagtacaatggctatgccccgtccatcggctacctatccagtcgggaggaggtcgcttcttactaccactgtcatgaggctcctctggaagctaaggatgtcattctgacaagcggctgcagtcaggccattgagctatgtctagctgtgttggccaatcctggacaaaacatcctcattccaaggcccgggttttccctctataggactttggctgagtctatgggaattgaggtcaagctctacaatctcctgcctgagaagtcttgggaaattgacctaaaacaactggaatctctgatcgatgaaaaaacagcgtgtcttgttgtcaacaacccatccaatccctgtggctccgtgttcagtaagcgacaccttcagaagattttggcagtggctgaaaggcagtgtgtccccatcttagctgacgagatctatggtgacatggtgttttcagattgcaaatacgaaccactggccaacctcagcaccaatgttcccatcctgtcctgtggtgggctggccaagcgctggctggttcctggctggaggttgggctggatcctcattcatgatcgaagagacatttttggcaatgagattcgagacgggctggtgaaactgagtcagcggatcctgggaccatgcaccatagtccagggtgctctgaagagcatccttcagcgaacccctcaggagttctatcacgacacgttaagcttcctcaagtccaatgcggacctctgctatggggcactggctgccatccctggactccagccggtccgcccttctggagccatgtaccttatggtgggaattgagatggagcatttcccggaattcgagaacgacgtggagttcacagagcggttgattgcggagcaggctgtccactgtctcccagcaacgtgcttcgagtacccaaatttcttccgagtggtcatcacagtccccgaggtgatgatgctggaggcttgtagccggatccaggagttctgtgaacagcactaccactgtgctgaaggcagccaggaggagtgtgacaaataagccctcacccgtcctcctgaagacatgtcccacgcaaggacggttggactggaccgctcctcctcagggagccaaatgtctctgatgggagaggaacctctaaagcaccgcatgaagacttgaagatcatttctccttcccccagtttcacccaacgcacgcctggaaacccagacccctccctactcagttctgctggagccatgagctcactgccccccaccccccacttccttatcctgagggtatcagaccaatttaccagaaagaagctgggccaagaaaagagagagctcaggatgagagaagcagaagacggaggatgcctctcccacccatttcctcgtgctgacatcctcttcagtcaggtcggaagtcacctcagttgctgcctcacttcaggcaaacctcactcctcgtggtacagctacaccagagagaagtcgaggacttgtgaattcagttaattgtattctaaacacatcaggaaacttgatgtttaaaggatccctgacagaatttttatttttattttttgtaaaggattattttgcggtgcaaataaataccagcttcctaaactgatcaacttcctaactgattagatagatctacttgtatcaggttttcctaaaataggaggacacctcactgaaggagaaagaagggaccggaggcctctctagagactttgctgtgtacaggacagcatcttcctccttgtcttctcgtagaatcatatatagccacttttgctatcatgtgaatattgatttattgatatttgtaatattaacttttcatatattttcctaagaaacatttatattataaggccttttattttgtcaagggcataaattattttttctttatttttgaaataaaaatttatcaaat

SEQ ID NO: 3398 - DNA, 735 bp, Rattus norvegicus
  Genbank Accession No. X02904
acgcagctttgagtccacacctctgtctacgcagcagctatgccgccgtacaccattgtgtacttcccagttcgagggcgctgtgaggccacgcgcatgctgctggctgaccagggccagagctggaaggaggaggtggttaccatagatgtctggcttcaaggctcgctcaagtccacttgtctgtatgggcagctccccaagtttgaagatggagacctcaccctttaccaatctaatgccatcttgaggcacctgggtcgctctttagggctttatgggaaagaccagaaggaggctgccttggtggatatggtgaatgatggggtggaggaccttcgatgcaaatatggtaccctcatctacactaactatgagaatggtaaggatgactatgtgaaggccctgcctgggcatctgaaaccttttgagaccctgctgtcccagaaccagggaggcaaagctttcattgtgggtaaccagatttcctttgcagattacaacttgctggacctgctgctggtccaccaagtcctggcccctggctgcctggacaacttccccctgctctctgcctatgtggctcgcctcagtgcccgccccaagatcaaggcctttctgtcctcccctgaccatttgaaccgtcccatcaacggcaatggtaaacagtagtggacgaagggacaggaactccttgtcccccttttcccagactaataaagtttgtaaggcaga

SEQ ID NO: 3399 - DNA, 413 bp, Rattus norvegicus
  Genbank Accession No. X03468
atgaagctgcttgcaatggttgcactgctggtcaccatctgtagcctagaaggagctttggttcggagacaggcagcggagacggatgtgcagaccctgttcagccagtatcttcagagtttaactgactatggcaaggatttgatggagaaggcccagccctcagagattcagaaccaagccaaggcttactttcagaatgcacaggagagactgacaccctttgtccagagaactgggacgaatctgatggacttcttaagccgtttaatgagccccgaggagaaaccagctcctgccgctaagtgaggtgtgtcaggactcgtcttcctaccccagctgacccactggccatcgctggagtccctctcccgactttctgcttgtcttttccaataaattcggaaggagtt

SEQ ID NO: 3400 - DNA, 1846 bp, Rattus norvegicus
  Genbank Accession No. X03478
gttggtgtggccgatggactttagtcactggatgaatataaaaataatccttgatgaacttgtacagaggggccatgaggtcactgttctgaaaccttcggcttacttttttcttgatccgaaaaaatcgtctgaccttaagtttgaaattttttctacatctatcagtaaagatgagctgcaaaatcatttcataaaacttttggatgtgtggacttatgagttgccaagagatacatgtttgtcatattctcctatccttcaaaatctagtttatgaattttcttatttttatctaagtatttgtaaagacgctgtttcaaacaagcagctcatgacaaaactacaggaatccaagtttgatgttcttttcgcagatcctgtggcttcctgtggggagctgatagctgaactgctccacattccttttctgtacagtcttagcttctctccaggccacaaacttgaaaagtccattggaaaatttatactccctccatcttatgtgcctgtaattttgtcgggactggctggcaaaatgacattcatagacagggtaaaaaatatgatatgtatgctttatttcgacttttggttcgagagacttagacacaaggaatgggacacgttttacagtgagattttgggaaggcccaccaccgtagatgagacaatgagcaaagtagaaatatggcttattagatcctattgggatttgaaatttccccacccaacattaccaaatgttgactatattggaggactccattgcaaaccttctaaacccttgcctaaggatatggaagaatttgtccagagctctggagagcacggtgtggtggtgttttctctggggtcaatggtcagcaacatgacagaagaaaaggccaacgcaattgcatgggcccttgcccagattccacaaaaggttctttggaaatttgatggcaaaaccccagcaacattaggacccattaccagagtctacaagtggctcccgcagaatgacatcctgggtcacccaaaaaccaaagcctttgtaactcatggtggagccaatggcctctatgaggcaatctatcatggaatccctatgattggcattcctctgtttggagatcaacctgataatattgcccacatggtggccaaaggagcagctgtttcattgaatatcaggacaatgtcaaagttagattttctcagtgcactggaggaagtcatagacaatccgttctataaaaaaaatgttatgttgttgtcaaccattcaccatgaccagcctatgaagcccctggacagagctgtcttctggattgagtttatcatgcgccacaaaggggccaagcacctgagaccacttggacataaccttccctggtaccagtaccactctctggatgtgattggattcctgctcacctgttttgcagtcattgcagctcttactgtaaaatgtctcttgttcatgtaccgattctttgtaaagaaggaaaagaaaatgaagaatgagtagagctcattgacaatgcactaactgaaatgaaatttcagcgtcattctaatttatgaaccaccttctaaaaattactaattttttatcaaggtagataacctttgtaggaagacatataactccgtgaatactgatatgtactcaaaaatccatcatttttaaattttaaaaccacttaatgtaaaagttacattgtagaaaaatgtgcagaataaaattattcttgatagagtccaaataatcaagtattaaccttaaaatatttgaatagtgccattagcttctttgtctaactgtagctttcatacaataaaatgtagataacttgta

SEQ ID NO: 3401 - DNA, 1485 bp, Rattus norvegicus
  Genbank Accession No. X04070
cgcagtgccagggaggtgtgaatgaggcaggatgaactggacaggtctatacaccttgctcagtggcgtgaatcggcattctacagccattggccgagtatggctgtccgtcatctttatcttcagaatcatggtgctggtggtggctgcagagagcgtgtggggtgatgagaagtcttctttcatctgtaacaccctccagccgggctgtaacagcgtctgctatgaccattttttccccatctcccatgtgcgcctgtggtccctgcaactcatcttggtttccaccccagctctcctcgtggcaatgcacgtggctcaccaacaacacatagaaaagaaaatgctacggcttgaggggcacggggacccccttcacctggaagaggtaaagaggcacaaggtgcacatctcagggacactgtggtggacctatgtcatcagtgtggtgttccggctgctgtttgaggctgtcttcatgtatgtcttctatctgctctacccgggctatgccatggtgcggctggtcaagtgtgaggccttcccctgccccaacacggtggactgcttcgtgtcccgccccactgagaaaaccgtcttcactgtctttatgctcgccgcctccggcatctgcattatcctcaacgtggcggaggtggtgtacctcatcatccgggcctgtgcccgccgtgctcagcgccgctccaatccgccctcccgcaagggctcgggcttcggccaccgcctctcacctgaatacaagcagaatgagatcaacaagctgctgagcgagcaggatggctctctgaaagacatactgcgccgcagtcctggcactggggccgggctggctgagaagagcgaccgatgctcagcctgctgatgccgagtaccaggcaacctcccatccaacccctccctcaccccacccaggcctgcccctccttctcctatgctggtgagcaggcctctgcctcctagggattactccatcaaaccttccctccctccctactccccttcctcagagagtcttctgtcaaagacctggccggcttgggagtggggagccacttctgcaccagggctcaaggttattgagggtgtgggcaattctttctgcctataccctttcctcttccctctccctgagatgagggatgagatgttctgaaggtgtttccaattaggaaacgtaatcttaacccccatgctgtcaggtaccccactttgggagtcatgtcagtggggagggctgtgagcaagcagagtggaggaggggctctgcactgtggatggagaagggaggggagcttgccttgctgcctgctacaaggaaaaggaggacacatctagggtgggggagttctggagggagaagcaggcagataaatcagagtgggggttggtcagggctgcccccagtccccagttcccaaggcctctctctctgaaaatgttacacattaaacaggattttacagt

SEQ ID NO: 3402 - DNA, 1055 bp, Rattus norvegicus
  Genbank Accession No. X04229
ctgaagccaaattgagaagaccacagcgccagaaccatgcctatgatactgggatactggaacgtccgcgggctgacacacccgatccgcctgctcctggaatacacagactcaagctatgaggagaagagatacgccatgggcgacgctcccgactatgacagaagccagtggctgaatgagaagttcaaactgggcctggacttccccaatctgccctacttaattgatggatcgcgcaagattacccagagcaatgccataatgcgctaccttgcccgcaagcaccacctgtgtggagagacagaggaggagcggattcgtgcagacattgtggagaaccaggtcatggacaaccgcatgcagctcatcatgctttgttacaaccccgactttgagaagcagaagccagagttcttgaagaccatccctgagaagatgaagctctactctgagttcctgggcaagcgaccatggtttgcaggggacaaggtcacctatgtggatttccttgcttatgacattcttgaccagtaccacatttttgagcccaagtgcctggacgccttcccaaacctgaaggacttcctggcccgcttcgagggcctgaagaagatctctgcctacatgaagagcagccgctacctctcaacacctatattttcgaagttggcccaatggagtaacaagtaggcccttgctacactggcactcacagagaggacctgtccacattggatcctgcaggcaccctggccttctgcactgtggttctctctccttcctgctcccttctccagctttgtcagccccatctcctcaacctcaccccagtcatgcccacatagtcttcattctccccactttctttcatagtggtccccttctttattgacaccttaacacaacctcacagtccttttctgtgatttgaggtctgccctgaactcagtctccctagacttaccccaaatgtaacactgtctcagtgccagcctgttcctggtgggggagctgccccaggcctgtctcatctttaataaagcctgaaacac

SEQ ID NO: 3403 - DNA, 3417 bp, Rattus norvegicus
  Genbank Accession No. X04440
aggctctctcaaacttctgccgcagctcttcattgccctcgcttccttccggcggcaccggcacattaaagtactcgccttcttcctggcttagtaacttgaaccctcatctccttgaaccttcgggtacttaggcgttcaatcctttcttgggcacccgaggtgctcatcttaacgcaccccagggcctaggacagggtgccaggggcgcggctcagatctgtccagcgcagtctgcggtcctcgcgccgcagcgtgcggctaagaacacttggctggggggcctgcgggttgcggtgtgtgtgtatatgtgtgtgtgtctgagtctgtgtgtgcgtttgctggtggtgccgatatgtaaagcagctggcggctctgggcggggcctgggttccatgcaaatgaaggaggaggggctaccctggggctccgcctccctcccccgcagctggggccagcggtgccaagcacagctggaccagcggcagcagctgggcgagtgacagcccagcaacgcgcgcgcggccgccgccagagccggcgcgaaggggcagcgcggccctgcggtccccgggcggcagcagcggccgcctagtcccgcgcctctccgggcttacagcccccggtcccgccgccccggggccgccacctctcggggctccccccagtccccgcgcgcgcaagatggctgacccggctgcggggccgccgccgagcgagggcgaggagagcacggtgcgcttcgcccgcaaaggcgccctccggcagaagaacgtgcacgaggtgaagaaccacaaattcaccgcccgcttcttcaagcagcccaccttctgcagccactgcaccgacttcatttggggcttcgggaaacagggattccagtgtcaagtctgctgctttgttgtacacaagcgctgccatgaattcgtcacgttctcctgccctggtgcagacaagggcccggcctctgatgacccacggagcaaacacaagtttaagatccacacctactccagccctaccttctgtgaccactgtggatcactgctgtatgggctcatccaccaggggatgaaatgcgacacctgtatgatgaatgtccacaagcgctgcgtgatgaacgtccccagcctctgtggcaccgaccacacagaacgccgtggccgcatctacatccaggcccacatcgacagggaggtcctcatcgttgttgtaagagatgctaaaaatctggtacctatggaccccaacggcttgtcagatccctacgtaaaactgaaactgatccctgatcccaaaagtgagagcaagcagaagaccaagactatcaaatgctccctcaacccggagtggaacgaaaccttcagatttcagctgaaggaatcagacaaagacagaagactgtccgtagagatctgggattgggacctgaccagcaggaatgacttcatgggatctctgtcgtttgggatttcagaactacagaaagccggagtggatggctggttcaagttactaagccaggaagaaggcgagtactttaatgtgccggtgccgccggaaggaagcgagggcaatgaagagctgcggcagaagtttgagagagccaagattggccaaggtaccaaggctccagaagaaaagacagcgaacactatatccaaatttgacaacaatggcaacagggaccggatgaaactgaccgattttaacttcctgatggtgctggggaaaggcagctttggcaaggtcatgctctcagagcggaagggtacagatgaactctatgccgtgaagatcctgaagaaagatgtggtgatccaagatgacgatgtggagtgcacaatggtggagaagagggtgctggccctgcctgggaagcccccattcctgactcagctccattcctgcttccagaccatggaccgcctctactttatgatggagtatgtgaacgggggtgacctcatgtaccacatccaacaagttggccgtttcaaggagccccatgctgtattttacgctgcagagattgccatcggtcttttcttcttgcagagcaagggcatcatttaccgtgacctgaaacttgacaacgtgatgctggattccgaggggcacatcaaaatcgctgactttggcatgtgtaaagagaatatctgggatggggtgacaaccaagacattctgtggcactccagactacattgccccagagatcattgcttatcagccctacgggaagtctgtggactggtgggcgtttggagtcctgctgtatgaaatgttggctggccaggcaccttttgaaggggaggatgaggatgaactcttccagtcaatcatggagcacaacgtggcgtatcccaagtccatgtctaaggaagctgtggcaatctgcaaagggctaatgaccaaacacccaggcaagcgcctgggttgtgggcctgaaggggaacgagacattaaggagcatgcatttttccggtatatcgactgggagaaactcgaacgcaaggagattcagccaccttataaaccaaaagcttgtgggcgaaacgctgaaaacttcgaccggtttttcacccgccatccaccagtcctaacacctcctgaccaggaagtcatcaggaatattgaccaatcagaattcgaaggattttcctttgttaactctgaatttttaaaacccgaagtcaagagctaagtagatctgtagacctccgtccttcatttctgtcattcaagctcaacagctatcatgagagacaagcgagacacctccaacttcgacaaagagttcaccaggcagcctgtggaactgactcccactgacaaactcttcatcatgaacttggaccaaaatgaatttgctggcttctcgtatactaacccagagtttgtcattaatgtgtaggtgaatgcagattccatcgctgagcctgtgtgtaaggctgcaggctgaatgtctattatcaattccagtcttccaggattcatggtgcctctgttggcatccgtcatgtggagagcttgtcttagagggcttttctttgtatgtatagcttgctagtttgttttctacatttcaaaatgtttagtttagaataagtgcattgcccactgatagaggtacaattttccagacttccagaaactcatccaatgaaccaacagtgtcaaaacttaactgtgtccgataccaaaatgcttcagtatttgtaatttttaaagtcagatgctgatgttcctggtcaaagtttttacagttactctcgaatatctcctttgaatgctacctaagcatgaccggtatttttaaaagttgtgagtaagctttgcagttactgtgaactcttgtctcttggaggaaactttttgtttaagaattggtatgattaaatgaattcatatatgc

SEQ ID NO: 3404 - DNA, 1619 bp, Rattus norvegicus
  Genbank Accession No. X05341
taaccttggccccggcggcgcgggggggggggggggcagggatggaaaagtaggggaaagggcaggggcgcggcctctcggggcgccgccacactattaaggctgggctagggctggtggccgagtgaagctgtgagagacccgtggaataactgagcttcgtcatggcgctgctacgaggtgtgtttatcgttgctgcgaagcgaacaccctttggagcttatgggggtcttctcaaggacttcactgccactgacttaactgaatttgctgccagggctgccctgtctgctggcaaagttccaccggaaaccatcgatagtgtcatcgtgggcaatgtcatgcagagctcttcagatgcggcgtacctggcaaggcatgtgggtttacgtgtgggagtcccgacggagactggggccctcaccctcaacagactctgtggctctggtttccagtccatcgtgagcggatgtcaggaaatctgctcgaaagacgctgaggtcgtcttatgtggaggaaccgagagcatgagccagtccccctactctgtcagaaatgtgcgcttcggaaccaaatttgggttagatctcaagctggaagatactttgtgggcaggattaacggatcaacacgtgaagctccccatggggatgactgcagagaacctggctgcaaaatacaacataagcagagaagactgcgacagatacgccctgcagtcccagcagaggtggaaagccgctaacgaggctggctactttaatgaggagatggcccccattgaggtgaagaccaagaagggcaaacagaccatgcaagtggatgagcacgcccggccccaaacgaccctggagcagctgcagaacctcccgccagtgttcaagaaagaggggacggtcacagcagggaacgcctcgggcatgtctgacggtgctggggtcgtcatcatagccagcgaagatgctgtcaaaaaacataacttcacaccactggccagagtcgtgggctactttgtgtctggatgtgaccctgctatcatggggatcggtccagtccctgccatcactggagcattgaagaaagctgggctgagccttaaggacatggatttgatagacgtgaatgaagcatttgctcctcagttcttggctgttcagaagagcttggatctcgaccccagtaaaaccaacgtgagtggaggtgccatagccctgggtcacccgctgggaggatctggatccagaatcaccgcacacctggttcacgagttaaggcgtcgaggtggaaaatacgcagtgggatcagcttgcattggaggtggccaaggcatctccctgatcatccagaacacagcctgaagggattgcaagcatcctacccaccctcacttggccaggctacggaacacaggcgacctttgagtcagccctgctgtgacagtaaatgcatttgaccaagccttgatgggttctgtctacttcatacctgcctagcgtgttagaataaaaagaccagccatcagaggcctttagagatacctactggtgtcattgtcagcagccaccactgtatgccttacatggtgaaattacaaactgaataaatgttgccttaactcc

SEQ ID NO: 3405 - DNA, 927 bp, Rattus norvegicus
  Genbank Accession No. X05566
gcggcggcaaagcttcgcagagacgctcactcttggttctcgcggctgagcagggatttaaccgccaccatgtcgagcaaaagagcgaagaccaagaccaccaagaagcgccctcagcgcgcaacgtccaacgtgttcgccatgtttgaccagtcccagatccaggagttcaaagaggccttcaacatgatcgaccagaaccgggacggcttcatcgacaaggaggacctgcacgatatgctggcttcaatgggaaaaaatccaactgatgaatacctggacgccatgatgaatgaggccccgggccccatcaatttcaccatgttcctcaccatgtttggagaaaagctgaacggcaccgaccctgaggacgtcatcagaaatgccttcgcttgcttcgatgaggaagcaatcggcaccatccaggaggattacctgagggagctgctcaccaccatgggcgaccgcttcacagatgaggaagtggatgagctgtacagggaggcccccatcgacaaaaaggggaatttcaactacatcgagttcacgcgcatcctcaagcacggagcgaaagacaaagatgactgaagagctgtggcttccagccaaatgtccctgttgccattgggtatttctgagattttcctcctggagcggtcggctgcccttgcttttctgccttttgcttcccttgttttgtatttattctcagccactttgggccacgtgtaccttcatcatcagactggaaacgggactttctgtcattgttcgatgagaacgtaaggtaatttaacttacagacagtcttgtcccttgtaataactgcagccacagagtcagtatattttttcagagaaagttatccactcaattttttctgaatgataattaaactttctgataaaataaaaaaaaaaaaaaaaa

SEQ ID NO: 3406 - DNA, 958 bp, Rattus norvegicus
  Genbank Accession No. X06107
cgaatgttcccccagctgtttcctgtctacagtgtctgtgttttgtagataaatgtgaggattttctctaaatccctcttctgcttgctaaatctcactgtcgctgctaaattcagaccagatagagcctgcgcaatcgaaataaagtcctcaaaattgaaatgtgactttgctctaacatctcccatctctctggattctttttgcctcattattcctgcccaccaattcatttccagactttgtacttcagaagcgatggggaaaatcagcagtcttccaactcaattatttaagatctgcctctgtgacttcttgaagataaagatacacatcatgtcgtcttcacatctcttctacctggcactctgcttgctcacctttaccagctcggccacagccggaccagagaccctttgcggggctgagctggtggacgctcttcagttcgtgtgtggaccaaggggcttttacttcaacaagcccacaggctatggctccagcattcggagggcaccacagacgggcattgtggatgagtgttgcttccggagctgtgatctgaggaggctggagatgtactgtgctccgctgaagcctacaaagtcagctcgttccatccgggcccagcgccacactgacatgcccaagactcagaagtcccagcccctatcgacacacaagaaaaggaagctgcaaaggagaaggaaaggaagtacacttgaagaacacaagtagaggaagtgcaggaaacaagacctacagaatgtaggaggagcctcccgaggaacagaaaatgccacgtcaccgcaagatcctttgctgcttgagcaacctgcaaaacatcggaacacctgccaaatatcaataatgagttcaataccatttcagagatgggcatttccctcaatgaaatacacaagtaaacattccgacattgtctttaggagtgtttgtt

SEQ ID NO: 3407 - DNA, 988 bp, Rattus norvegicus
  Genbank Accession No. X06150
caggatggtggacagcgtgtaccgtacccgctccctgggggtggcggccgaagggatccccgaccagtatgcggatggggaggccgcacgtgtgtggcagctgtacatcggggacacccgcagccgtactgcagagtacaaggcgtggttgcttgggctgctgcgccagcacgggtgccaccgggtgctggacgtggcctgtggcacaggagtggactcgattatgctggtggaagagggctttagcgtcacgagtgtggatgccagcgacaagatgctgaaatacgcactgaaggagcgctggaaccggaggaaggagccagcctttgacaagtgggtcattgaagaagccaactggttgactctggacaaagatgtgccagcaggagatggctttgacgctgtcatctgccttgggaacagttttgctcacctgccggacagcaaaggtgaccagagtgagcaccggctggcgctaaagaacatcgcaagcatggtgcggcccgggggcctgctggtcatcgaccaccgcaactacgactacatcctcagcacgggctgtgcacccccagggaagaacatctactataagagtgacctgaccaaggacattacgacgtcagtgctgacagtaaacaacaaagcccacatggtaaccctggactacacagtgcaggtgccaggtgctggcagagatggcgctcctggcttcagtaagtttcggctctcttactacccacactgtttggcgtctttcacggagttggtccaagaagcctttgggggcaggtgccagcacagcgtcctgggtgacttcaagccttacaggcccggccaggcctacgttccctgctacttcatccacgtgctcaagaagacaggctgagcctggctccggctcccaccctaagaccatcgcctaccacagatattgcagagatgtggggggcaggcaaacagggagtcgacaatacagccttcccttgcc

SEQ ID NO: 3408 - DNA, 465 bp, Rattus norvegicus
  Genbank Accession No. X06483
ggcatcatggctgcccttcggcctctggtgaagcccaagatcgtcaaaaagaggaccaagaagttcatcaggcaccagtcggaccgatatgtgaaaattaagcgaaactggcggaaacccagaggcatcgacaacagggtgcggagaagattcaagggccagatcctgatgcccaacattggttacgggagtaacaagaaaaccaagcacatgctgcctagcggcttccggaagtttctggtccacaatgtcaaggagctggaagtgctgctgatgtgcaacaaatcttactgtgctgagattgctcacaatgtgtcctctaagaaccgaaaagccatcgtagaaagagcagcacagctggccatcagagtcaccaatcccaacgccaggctacgcagcgaagagaatgaatagatggcttgtgtgcctgttttgtgttcaaataaaaccacaaaaactgccaaa

SEQ ID NO: 3409 - DNA, 1388 bp, Rattus norvegicus
  Genbank Accession No. X07320
gaattcctgtcacttccattcaagagcctacaagaacctaactaggtgcttgggatcccctgagatccagctgaccatgacccgggatgaggccctccctgactctcattctgcacagaatttctatgagaactacgagcccaaggagatcctgggcaggggagtcagcagcgtggtcaggagatgcattcacaaacctacgtgccaagaatacgcagtaaaaatcatcgacatcaccggcggaggaagctttagctccgaggaggtacaggagcttcgggaagccaccctgaaggaggtggacattctgcagaaggtctcaggacaccccaacatcatacagctgaaggacacttacgagaccaacactttcttcttcttggtatttgatctgatgaagagaggggaactctttgactatctcacagagaaggtcaccttgactgagaaggaaaccagaaagatcatgcgggccctgctggaggtggtctgcaccttgcacaaactcaacattgtccatcgggacctgaagccggagaacatccttctggatgacaacatgaacatcaagctcactgacttcgggttttcctgccagctgcagccaggagagaagctccgagaggtttgtgggactcccagttatctggcccccgaaatcatccagtgctccatggacgaaggccatcctggctatggaaaggaggtggacatgtggagcacaggagtcatcatgtatacgctgctggctggctccccgcccttctggcaccggaagcaaatgctaatgttgaggatgatcatggatggcaaataccagttcggctcaccagagtgggatgactactcagataccgtgaaagacttggtatctcgcttcttggtggtgcaaccccaggaccgctgctcggcggaagaggccttggcgcatcctttcttccaggagtacgtggtggaagaggtgcggcacttcagccctcgagggaagttcaaggtcatctgtctaactgtgctggcctcggtaaggatctactaccagtaccgtcgggtgaagccggtaaccagggagatcgtcatccgagacccctacgccctacggccattgcgcagactcatcgacgcctatgctttccgcatctacggccactgggtgaagaaagggcaacagcagaacagagctgccctcttcgagaacacgcccaaggcagtgctcctctccttggctgaggaggaggacttctgaggggtggcggggcacaggggagaaagcaaacagggtacgcgcccccagaactgtgagaagaggatgcctcaaggaggaggcttctgcaaaggagctgtgaccctactctgcactctcaaaggctcgccactagatgcgggaattc

SEQ ID NO: 3410 - DNA, 1867 bp, Rattus norvegicus
  Genbank Accession No. X12355
gattgcgggctctcccatctcggttctctggtcccggccctccgattgcccccgccgcatcccgccgccatgccttcagctgccttgcgctgctcccgggcgtggcgattgctgctcgcctcggccctcctcgcctccgcctcagacgtgttggaactgacggacgaaaacttcgagagtcgcgtctccgacacgggctcagctgggctcatgctagtcgagttcttcgccccatggtgtggacattgcaagaggcttgcccctgagtatgaagctgcagcaaccagattaaaaggaatagtcccattagcaaaggtggactgcactgccaacacaaacacctgtaataagtatggcgtcacgggctacccaactcttaaaatatttagagatggtgaagaagcgggtgcttatgatgggcctaggactgccgatggaattgtcagccacttgaagaaacaagcaggaccagcttcagttcctctcaggactgaggacgaatttaagaagttcattagtgataaagatgcctcggtggtgggctttttcagggatttattcagtgatggccactccgagttcctaaaagcagccagcaacttgagagataactaccgatttgcacacaccaacgttgaatctctggtgaaggagtacgatgataatggagaggggattactatatttcgtccattacatctggctaacaaatttgaagacaaaattgtggcatatactgaaaagaaaatgaccagtggcaaatcaagaagtttattcaggaaagcatttggtctctgtcctcatatgacagaagataataaagatttgatacaaggcaaggacttactcacggcttactatgatgtggactatgaaaagaatactaaaggttctaactactggagaaacagggtcatgatggtggcaaagacattccttgatgctggacacaaactcaactttgctgtagctagccgtaaaacctttagccatgaattgtctgactttggcttagaaagcactactggagagattcctgttgtggctatcagaactgctaaaggagagaagtttgtcatgcaggaggagttctcgcgggatggcaaggctcttgagcggttcctgcaggaatactttgatggcaacttgaagagatacctgaagtctgaacctatccccgagaccaacgaaggacctgtcaaggtggtggtagcagagagttttgatgacatagtgaatgctgaagacaaggacgtgctgatcgagttttatgctccttggtgtggccactgtaagaacctggaacccaagtacaaagagctgggggagaaactcagcaaagacccaaatattgtcatagccaagatggatgccacagccaatgatgtgccttctccatatgaagtcaagggttttcctaccatctacttctcaccagccaacaagaagctaactccaaagaagtatgaaggtggccgtgaattaaatgattttatcagctatctacaacgagaagctacaaaccctcctataattcaagaagaaaaacctaagaagaagaagaaggcacaagaggacctctaaagcaacagccaaatgcaccactttataaaaggactcttacaccagagaaagcaaaaccatcagagaggacagaatggatatactctgaatcctgttaaattttctctaaactgtttcttagctgcactgtttgaaaataccaggaccagtttatgtttgtggtttggggagaaaattatttgtgttgggaagaatgtggtaggggtggggggaattgagttggggggttattttctaattttttttgtacatttggaacagtgacaataaatgtgcccccttt

SEQ ID NO: 3411 - DNA, 1627 bp, Rattus norvegicus
  Genbank Accession No. X13058
cccctgaagactggataactgtcatggaggattcacagtcggatatgagcatcgagctccctctgagtcaggagacattttcatgcttatggaaacttcttcctccagatgatattctgcccaccacagcgacagggtcacctaattccatggaagatctgttcctgccccaggatgttgcagagttgttagaaggcccagaggaagccctccaagtgtcagctcctgcagcacaggaacctggaactgaggcccctgcacccgtggcccctgcttcagctacaccgtggcctctgtcatcttccgtcccttctcaaaaaacttaccaaggcaactatggcttccacctgggcttcctgcagtcagggacagccaagtctgttatgtgcacgtactcaatttccctcaataagctgttctgccagctggcgaagacatgccctgtgcagttgtgggtcacctccacacctccacctggtacccgtgtccgtgccatggccatctacaagaagtcacaacacatgactgaggtcgtgagacgctgcccccaccatgagcgttgctctgatggtgacggcctggctcctccccaacatcttatccgggtggaaggaaatccgtatgctgagtatctggacgacaggcagacttttcggcacagcgtggtggtaccgtatgagccacctgaggtcggctccgactataccactatccactacaagtacatgtgcaacagctcctgcatggggggcatgaaccgccggcccatccttaccatcatcacgctggaagactccagtgggaatcttctgggacgggacagctttgaggttcgtgtttgtgcctgtcctgggagagaccgtcggacagaggaagaaaatttccgcaaaaaagaagagcattgcccggagctgcccccagggagtgcaaagagagcactgcccaccagcacaagctcctctccccagcaaaagaaaaaaccactcgatggagaatatttcacccttaagatccgtgggcgtgagcgcttcgagatgttccgagagctgaatgaggccttggaattaaaggatgcccgtgctgccgaggagtcaggagacagcagggctcactccagctacccgaagaccaagaagggccagtctacgtcccgccataaaaaaccaatgatcaagaaagtggggcctgactcagactgacagcctctgcatcctgtccccatcaccagcctccccgtcccctcctttcttgccattttatgactttagggcttgttatgagagctgacaagacaatgctagtcccttcactgcctttttttaccttgtagatagtactcggccccctctatgcaaactggttcctggcccagattggggaatgggttggtagttgctgggtctctgctggtccagcgaaatcctatccggtcagttgttggacctggcacctacagtgaaatttcaccccaccccaccgcctgtaagattctatcttgggccctcatacgatctgtatcctccaggacccatttcctccactctgcaaagcctgtctgcatttatccatcccccacccctctccctctttttatctctttttatatatccaatttcttattttacaa

SEQ ID NO: 3412 - DNA, 1446 bp, Rattus norvegicus
  Genbank Accession No. X13933
acgcacaacgcaggtagcgcgttagcagcagcagcggaggcatctcggcggtcacagcccctgcgctgtgcagccaccctcgcctgccgctcttccttccttcgctcgcaccatggctgatcagctgactgaagaacagattgctgaattcaaggaagctttctccctatttgataaagatggggacggcaccatcacaacaaaggagctggggactgtcatgcggtcactgggtcagaacccaacagaggctgaactgcaggatatgatcaacgaggtggatgccgacgggaatggcaccattgacttcccagagttcttgactatgatggctagaaaaatgaaagacacagatagcgaagaagaaatccgtgaggcattccgagtctttgacaaggatggcaatggctacatcagtgcggcagaactgcgccacgtcatgacaaacctcggggaaaagctaacagatgaagaagtagacgaaatgatcagagaagcagatattgatggagacggacaggtcaactatgaagaattcgtacagatgatgactgcaaaatgaagacctactttcaactactttccccctctagaagaatcaaattgaaatcttttacttacctcttacaaaaaaaaaaaaagaaaaaagaaaaaagttcatttcttcattctgtttgtatctagcaaaactgaatgtcaaaagtaccttctgtccacacacaaaatctgcatgtattggttggtggtcctgccccctaaagatcaagccccctacatgagttttacagtataaatactcgtactaccttataaggaagcacttagtgactccttcaagttccatttgctaatgattaacacactgtctgggctggccagtttctcatgcatgcagcttggtgattgagcacagtcaggcctttgtattaaaactgaaaaatggaaaaaacaaattcaaactctcagatggcttctagttcaatctgttcagataaatgtcagcagccagtttaccgcaaacaaacatttaaaattggtttacctcaggatgatgtgcaggaaacgggtgaaggctaaactttgagacacagccctagatgtaggacagtcctcttcaagtgccccaatcccatggtgacagtgacaccctggtggcgagcccgagtgtgatggttcaccgctgtgcacattgcattggagtgaagtgaacaaggctgtcaccaaatcacacacgttttaataagaaatgtttactaagggagcatctttggactctctgttttaaaaccttgtgaaccatgactcggagccagcagagtaggctgtgtctgtggacttgagcacaccatcaacattgctgttcaggaaattataatttacgtccattccaagttgtaaatgctagtcttttattttttttttccaataaaaagaccattaacttaa

SEQ ID NO: 3413 - DNA, 16300 bp, Rattus norvegicus
  Genbank Accession No. X14848
gttaatgtagcttataataaagcaaagcactgaaaatgcttagatggattcaaaaatcccataaacacaaaggtttggtcctggccttataattaattggaggtaagattacacatgcaaacatccataaaccggtgtaaaatcccttaaagatttgcctaaaacttaaggagagggcatcaagcacataatatagctcaagacgccttgcctagccacacccccacgggactcagcagtgataaatattaagcaatgaacgaaagtttgactaagctagtacctctcagggttggtaaatttcgtgccagccaccgcggtcatacgattaacccaaactaattattttcggcgtaaaacgtgccaactataaatctcataatagaattaaaatccaacttatatgtgaaaattcattgttaggacctaagcccaataacgaaagtaattctaatcatttatataatgcacgatagctaagacccaaactgggattagataccccactatgcttagccctaaaccttaataattaaacctacaaaattatttgccagagaactactagctacagcttaaaactcaaaggacttggcggtactttatatccatctagaggagcctgttctataatcgataaaccccgttctaccttaccccttctcgctaattcagcctatataccgccatcttcagcaaaccctaaaaaggcactaaagtaagcacaagaacaaacataaaaacgttaggtcaaggtgtagccaatgaagcggaaagaaatgggctacattttcttttcccagagaacattacgaaacctttatgaaactaaaggacaaaggaggatttagtagtaaattaagaatagagagcttaattgaatagagcaatgaagtacgcacacaccgcccgtcaccctcctcaaattagattgacattcacatatacataatttcactaacaaatttatgagaggagataagtcgtaacaaggtaagcatactggaaagtgtgcttggaataatcacagtgtagcttaatcacaaagcatctggcctacacccagaagaattcataaaaaatgaacactttgaactaaccctagccctacaaccaaccaacataactaaacccccacataaactaaaacatttaactcaaaaagtattggagaaagaaatttacttaccaagagctatagagaaagtaccgcaagggaaatgatgaaagactaatttaaagtaaaaacaagacaaagattaaacctgtaccttttgcataatgaattaactagaaaatccttaacaaaaagaatttaagctaagaaccccgaaaccaaacgagctacctaaaaacaatttcatgaatcaacccgtctatgtagcaaaatagtgggaagatttttaggtagaggtgaaaagcctatcgagcttggtgatagctggttgcccaaaaaagaatttcagttcaaactttaagcttccatcagaacaacaaatcaaaatgtaaacttaaaatatagccaaaagagggacagctctttaggaaacggaaaaaaccttaaatagtgaataaacaactacaatcacttaaccattgtaggcttaaaagcaagccatcaataaagaaagcgtcaagccacatcatcttacacacacactaattccacaaacctcaaaaattccaaaattacaaattgggctaaatctatgatcctagtgaatactgttaatatgtgaacaagaaccaatccaccaagcacaagtgctaagacaaccggataaccattgttaattattgaatcataggcataacccaacaatagaattacctatccctaactcgttagcccaacacaggcgtgctttaaggaaagtttaaaaaagtaaaggaactcggcaaacacgaaccccgcctgtttaccaaaaacatctcctctagcataacaagtattagtggcatcgcctgcccagtgactaaagttccacggccgcggtatcccgaccgtgcaaaggtaggataatcacttgttccttaattagggactagaatgaatggctaaacgagggtccaaccgtctcttacttgcaatcagtgaaattgaccttccagtgaaggggcggactcataataaaagacgagaagaccctatggagctttaatttactaatttcaatttatataaaaaaacctaatgggcgaaaacaacaaaattatgaactaccaaatttcggttggggtgacctcggagaataaaaaatcctccgaatgattataaccgagtcggtaaccgtgtccgacccagtcaagtaatactaatatcttattgacccaattattgatcaacggaccaagttaccctagggtaacagcgcgacctatttaagagttcatatcgacaattagggtttacgacctcgatgttggatcaggacatcccaatggtgcagaagctattaatggttcgtttgttcaacgattaaagtcctacgtgatctaagtccggcaatccaggtcggtttctatctatttacaatttctcccagttacgaaaggacaagagaaatggagaccaaccaatcctaggcttccaaccaatttagaaaaacttaataaagtatatatgtacaataaataaccttagacccaagttattagggtggcagagccaagtaattgcgtaagacttaaaaccttgttcccagaggttcaaatcctctccctaatagtgtactttattaatatcctaacactcctaatcccaatcttaattgccataggccttctcaccctagtagaacggaaaatcctaggctacatacaattacgcaaaggccccaacaacgaaggcccatatggtaaactacaaccatttgcagatgccataaaactattcataaaagaacccatacgccctctaaccacctcaatatcactatttattatcgccccaaccctctcccttacactagctctaagcctatgaattcccttaccaataccccacccccttatcaacctcaacctaggcataccatttattctagccacatccagcctttcggtctactccattctatgatcgggatgagcctcaaattcaaaatactccctattcggagccctacgagccgttgcccaaaccatctcttacgaagtcacaatagccttatacctcttatccgtcctcctaataagcggctccttctccctacaaatacttatcactacacaagaacatatctgactattaatccccgcctgaccaatagccataatatgatacatttcaaccctcgcagaaacaaatcgagctcccttcgacttaacagaaggagaatcagaattagtctcaggctttaacgtcgaatacgccgcaggaccattcgccctattcttcatagccgagtacaccaacattattctaataaacgccctaacatcaattgtattcctaggccccttatatcatatcaattaccctgaattatactcaaccagcttcataacagaaacactacttctatccacaactttcctatggattcgagcatcctacccccgttttcgatatgaccaactaatgcacctcctatgaaaaaatttcctcccactaacactagcattctgcatatgatacatttccctgccaattttcctagcaggaattccaccctacacatagaaatatgtctgacaaaagagttactttgatagagtaaataatagaggtttaaatcctcttatttctaggacaataggaattgaacctacacctaagaattcaaaattctccgtgccaccaatacaccctatcctacatagtaaggtcagctaactaagctatcgggcccataccccgaaaatgttggttaaacccttcccgtactaataaatccaattaccctaaccattatttacttaaccacctttaaaggccgcctaatcacgacacttagcaccaacttaccaccaatatgagtaggattggaaataagccttttagctatcatcccacttctagccaacaaaaaaagcccacgatcaactgaagcagcaacaaaatattttctaacccaagctacagcctcaataattatcctactagtcatcatcctcaactacaaacaatcaggaatatgaacccttcaacaacaaaccaataacatactactcaacataatactcatttcactggccataaaacttggactagccccattccactactgactacccgaagtcacccaaggaattcccctacacattggattaatcttactaacatgacaaaaaattgctccactatcaattctataccaattttatcaactcctaaacccaactatcaccaccattctcgcaatttcatcagtctttgttggcgcctgaggaggacttaaccagacccaaacacgaaaaatcatagcatactcatcaattgcccacataggatgaataacagcaatccttccatacaaccctaacttaaccctcctaaacttaacaatttacatcctacttactgttccaatattcaattacatcataacaaactcagcaacaacaatcaacacactctcactcgcatgaaataaaactcccataatcctaaccatagcatccatcatcctcctatcactaggaggactcccccctctcacaggatttttaccaaaatgagcaattatctccgagcttctaaaaaacaactgctcaaccctatcaacactaatagctatcatagccctattaagcctattcttctatactcgactaatttactctatatccctcaccacattcccaaccaacaacaactccaaaataatctcccaccaccaaaacccaaaacataattttatcctcccaaccctcacagtattaagtaccctaaccctaccgctttcctcccaactaatcacatagaagtttaggatatacagttcaagagccttcaaagcccttagaaaacaaacaagtttaacttctgataaggactgtaagactatatcttacatctgttaaatgcaaatcaactgctttaattaagctaaatcctcaactagattggaaggaatcaaattcctacgaaaatttagttaacagctaaataccctacttactggcttcaatctacttctcccgcctatcagaaaagaggcgggagaagccttagtagaggagattctctacaccttcgaacttgcaattcgacatgataatcaccttaaggctttttggtaaaaagggggctcaacccctgtctttagatttacagtctaatgcttactcagccattttacctatgttcgtaaaccgttgactcttttcaactaaccacaaagatatcggaaccctctacctattatttggagcctgagcaggaatagtagggacagctttgagtattctaattcgagctgaactaggacagccaggcgcactcctaggagatgaccaaatctataatgtcatcgtcacagcccatgcattcgtaataattttctttatagtaatacctataataattggaggcttcggaaactgacttgtaccactaataattggagcccctgatatagcattcccacgaataaataacataagcttttgactgcttcctccatcatttctactccttttagcatcctccatagtagaagctggagctggaacaggatgaacagtatatccccccttagccggaaacctagcccatgctggggtatccgtagatttaactattttttccctccacctagccggggtgtcttctatcttaggagctatcaactttatcaccactatcattaatataaaaccccctgctataacccaatatcagacacctctctttgtatgatccgtactaattacagccgtcctactacttctctcactgccagtattagcagcaggtatcactatactccttacagaccgaaatctaaatactactttcttcgaccccgctggaggtggagacccaattctttatcaacacctattctgattcttcggccacccagaagtgtacatcttaattcttccagggtttggaattatttcacatgtagttacctattactctggaaaaaaagaacccttcggatatataggtatggtatgaaccataatatctattggcttcctaggatttattgtatgagcacatcacatattcacagtaggcctagatgtagacacccgagcctactttacatctgccactataattatcgcaattcctacaggcgtaaaagtattcagctgactcgctacactacatggaggaaatatcaaatgatcccccgccatattatgagccttagggtttatcttcttattcacagtagggggcctaacagggatcgtactatctaactcatcccttgacattgtacttcatgatacatactacgtagtagctcacttccactatgtcttatctataggagcagtattcgccatcatagctggcttcgtccactgattcccactattctcaggctataccctaaatgacacatgagcaaaagcccactttgccattatatttgtaggtgtaaacataacattttttcctcaacacttcctaggattagcagggatacctcgtcgttactctgattatccagatgcttataccacatgaaatacagtctcctctataggctcattcatctcacttacggccgtccttgtaatgatcttcatgatttgagaagccttcgcatcaaaacgagaagtgctctcaatttcctactcttcaactaacctagaatgactgcatggatgccccccaccttaccacacattcgaagaaccttcctatgtaaaagttaaataagaaaggaaggaatcgaccccctacaactggtttcaagccaatttcataaccattatgtctttctcaatgagatattagtaaaataattacataaccttgtcaaggttaagttatagacctaatcctatatatcttacatggcttacccatttcaacttggcttacaagacgctacatcacctatcatagaagaacttacaaactttcatgaccacaccctaataattgtattcctcatcagctccctagtactttatattatttcactaatactaacaacaaaactaacacacacaagcacaatagacgcccaagaagtagaaacaatttgaacaattctcccagctgtcattcttattctaattgcccttccctccctacgaattctatacataatagacgagattaataacccagttctaacagtaaaaactataggacaccaatgatactgaagctatgaatatactgactatgaagacctatgctttgactcctacataatcccaaccaatgacctaaaaccaggtgaacttcgtctattagaagttgataatcgggtagtcttaccaatagaacttccaattcgtatactaatctcatccgaagacgtcctgcactcatgagccatcccttcactagggttaaaaaccgacgcaatccccggccgcctaaaccaagctacagtcacatcaaaccgaccaggtctattctatggccaatgctctgaaatttgcggctcaaatcacagcttcatacccattgtactagaaatagtgcctctaaaatatttcgaaaactgatcagcttctataatttaaactcattgcgaagcttagagcgttaaccttttaagttaaagttagagacaacaaatctccacaatgacatgccacaactagacacatccacatgatttattacaatcatctcctcaatagccacactatttattttatttcaattaaaaatttcttcccaaacctttcctgcacctccctcacccaaaactatagccacagaaaaaacgaataacccttgagaatcaaaatgaacgaaaatctatttgcctctttcattacccccacaataataggtctaccaattgttgtgaccattattatgttcccatcaattctattcccatcatcagaacgcctaatcagcaaccgactacactcatttcaacactgactaatcaaacttatcatcaaacaaataatgttaattcacacaccaaaaggacgaacctgagccctaataattgtatccctaattatatttattggctcaaccaaccttctagggcttcttccccatacatttacccctaccactcagctatctatagacctaagcatagccatccccctatgagcaggagccgtaattctaggtttccgacacaaactaaaaaattctttagcccacttctcaccgcaaggaacccccatctcactaattcccatactaatcatcatcgaaactatcagcctatttattcaaccgatagcactagcagtacgactaacagcaaacattacagcaggccatctattaatgcatctaatcggaggagctaccctagtacttatagacatcagcccaccaaccgctacaattacatttattattctacttctacttacagtacttgaatttgccgtagccttaattcaagcctatgtattcacccttctagtcagcctgtacctacatgataacacataatgacccaccaaacccatgcataccatatagtaaacccaagcccatgaccactaacaggagccctatcagctcttctactcacatccggcttagtaatatgattccattacaactccacaattctcctatcattaggcctcctgacaaacatcctaactatatatcaatgatgacgagatatcatccgtgaaggaacataccaaggccaccacacccctattgtacaaaaaggcctccgatacggaataatcctgtttattgtctccgaagtattcttctttgccggatttttctgagcattttatcattccagcctagttcctacccacgacctaggcggttgctgacccccaacaggaatcacccctttaaatcccctagaagtaccccttctaaatacatcagtcctcttagcatcaggagtctcaattacatgagcccatcacagcctaatagaaggcaaccgaaaccatataaaccaagccctactaatcaccattctcttaggattatatttcactatcttacaagcctcagagtatttcgaaacatcattttctatctcagacggaatttacggctcaacattcttcatagcaacgggatttcatggcctccacgtaattattggctcaactttcctaattgtctgtctactacgacaactaaaattccacttcacatcaaaacatcatttcggatttgaagccgcagcatgatactgacacttcgtagatgtagtttgactattcctatacgtttctatctattgatgaggatcctactcccttagtataaacaatacaactgacttccaatcagttaattctgaaaaaactcagaagagagtaattaacctacccattatcatcacaattaacatcaccttatcctttatcctcatttcaattgcattctgattgcctcaaataaacttatactccgaaaaagcaaacccatatgaatgtggcttcgacccaacaagttctgcacgccttcctttttcaataaaatttttcttagtagccattacatttctactattcgacctagaaatcgccttactacttcccctcccatgagcgattcaaacaaccaataccactacaataatagcaactgcctttattttagtcactattttgtctcttggcctagcctacgaatgaacacaaaaaggactagaatgaacagaataattggtaattagtttaaataaaattaatgatttcgactcattagattatgataataatcataattaccaacaatgacatctgctttcctaaatttaactatagcctttacattatctctactaggtacttttatatttcgctcccacctaatatccactctcctctgcctagaaggaataatactatcactatttgtcataacttcaacatccacattaaactccaactccataatctccataaccatcccaattaccattctagtttttgcagcctgcgaagcagcagtaggtttagccttactagtaaaaatttcaaatacttacggaacagactacgtacaaaacctcaaccttctacaatgttaaaaattattttcccatctatcatactcctcccactaacatgactctcagccaacaaaaaaatctgaaccaatgtcacctcctacagctttctagtgagcctattaagcttatcactcctatgacaaaatgacgaaaattacctaaatttctcagttatattctcctccgatccattatccaccccactaatcattctaacaacttgactcctcccactaataatgctcgctagccaaaatcacataaaaaaagaaaatataatgcatcaaaaactttacatctcaatacttattagcctccaaattttactcatcataacattctccgcaacagaactaattttattttatatcctgttcgaggccactctaatcccaacactaattatcattacacgatgaggcaaccaaacagaacgcttaaatgcaggaatttatttcctgttttatacactaattggctccatcccactcttaattgccctcatttcaatccaaaactcaataggaacactcaacttcctaatcctttccctcacaacacaccccctaccctcaacatgatccaacaccattctatgactagcatgtataatagcatttataatcaaaataccattatacggagtccatctatgattaccaaaagcccacgtagaagctccaattgcaggctctataattttagcagcaattctcctaaagctagggggttatgggataatacgagtttccatcattctagaccccctaacaaaatctttagcctacccattcatcatcctctcattatgaggcataattataactagctcaatctgcctacgccaaacagatctaaaatcattaattgcttactcatcagtaagccatatagccctagtcatcacagccattataatccagacaccatgaagcttcatgggagccacaatactaataatcgcccacggcttaacctcatcactcttattctgcctagcaaacaccaactacgaacgaattcacagccgaactataattatagctcgaggattacaaataatctttccattgatagcaacatgatgactattagcaagcttagccaacctagcactaccacccctaattaacctcataggcgagttattcattgttatagcaacattttcctgatcgaacccctctatcatccttatagcaactaacattgtcatcacaggaatatactcaatatatatgattatcacaacccaacgaggaaaactaaccagccacataaacaacctccaaccttcccacacacgagaattaacactcatagctctacacattattcccctcatactattaacaatcaaccctaaactcatcacaggcctaacaatatgtagatatagtttacaaaaaacattagactgtgaatctaacaacaggaaatcaaattccttatttaccaagaaagtatgcaagaactgctaattcatgcacccatacctaaaacatatggctttcttacttttataggatagaagtaatccattggtcttaggaaccaaaaaccttggtgcaactccaaataaaagtaataaatataataacaatcctaatcctcataattcttgatttacttacaacaccaatcacattttcaataacaatcttaaccaaacttatgtacttccgtcatatgctcattacatcaattaaattctcattcctccttagcctcttacctttactactattcttccaccacaacacagaatacataattactaactgacattgactaactattaattctattaaacttactataagtttcaaaattgactatttctcaatcctattcctatcagtatccctattcgtaacatgatcaattatacaattctcttcatgatatatacactctgacccccacattaaccgattcattaagtacttaataatattcctgaataacatactaatcctaacctcagctaacaatctattccaactctttattggatgagaaggggtaggaattatatccttcttattaatcggatgatgatatggccttgcagacgccaacacagcggccctccaagcaatcctctacaaccgagtcggagacattggtttcatcctagctataacctgattctgcctaaacataaactcctgagaactccaacaaattttcttaaccaacaccaacaacaatctagtccctctcacaggactactaattgcagccacaggaaaatccgcccaattcggacttcatccatgactcccatcagctatagaaggcccaactcccgtctctgccctactacactcaagcacaatagttgtagcagggatcttcctaataatccgattccaccccctaacctcaaacaatagtactattataacagccatactatgtcttggtgcaatcaccacattattcacagcaatctgtgctctcacccaaaacgacatcaaaaaaatcgtagctttctcaacatccagccaactaggccttataatagtcacattagggattaaccaaccctaccttgctttcctccacatttgcacccatgcattcttcaaagccatattattcatatgctccggatcaatcatccatatcctcaacgatgaacaagacattcgaaaaataggcaatataataaaagcaataccattcacatcatcttgtctcattatcggaagcctagcccttaccggaatacctttcctcacaggattctattcaaaagatctcatcatcgaagccatcaacacgtgtaacaccaacgcctgagccctaataatcactttaatcgccacatccataactgctgtgtacagcatacggatcatctacttcgtcaccatgacaaaaccacgatactccccactaattactattaatgaaaacaacccaaacctcattaatccaatcaaacgcctagcattaggaagcatcctagcaggcttccttatctcactaaatattcctccaactaacattcaaattctcacaataccctgacatttaaaaataacagccctacttattacaatcctaggatttgccattgccctagaacttaacaatttaacactaaatctatcaataagcaaacccaccaaactatcatcattctcaacctccctaggctactacccaccaattataccccgaattattcctcaaaaaactctaaattctagctacaaattatccttaaacctactagacctaatctgatcagaaaagacaatcccaaaatcaacctcaatcacccaaacccaactatctaaaataatatccaaccaaaaaggactaatcaaactatatttcctatcatttctcatcactatttcactaatttttatcttacacacacttaatcccgagtgatttcaataataataaaaatccccgcaaacaatgaccacccagccaccactatcattcaagtagcacaactataaatagccgcaaccccaatccccccctccaacataaccccaacatcatcaatctcatacattaatcaatcgcctagactatcaaaatcaactaactccaccttattattcaaactaaacaagtagaacactaccaactccataaaaagccctaaaacaaaaaaactaaaaataaaccaattagaccctcaagtttccggatattcctcagtagccatagcagttgtatacccaaatacaaccaacatcccacccaaataaattaaaaatactattaaacctaaaaacgaacccccaaaccctaaaactattaagcacccaatacatccactaacaatcaatccaaacccaccataaataggtgaaggcttcaacgccaaccctagacaaccagtcaaaaacagtaaacttaaaataaacatataatttgtcattatttctacacagcatttaactgtgactaatgacatgaaaaatcatcgttgtaattcaactatagaaacatctaatgacaaacatccgaaaatctcaccccctattcaaaatcatcaaccactcctttatcgacctaccggccccatctaacatctcatcatgatgaaacttcggttctctactaggagtatgcctcatagtacaaatcctcacaggcttattcctagcaatacactacacgtctgataccataacagcattctcatcagtcacccacatctgccgagacgtaaactacggctgactaatccgatacctacaagccaacggcgcctcaatatttttcatctgcctattcctccatgtgggacgaggactatactatggatcctacactttcctagaaacctgaaacattgggatcatcctactatttgcagtcatagcaactgcattcatgggctatgtactcccatgaggacaaatatcattctgaggagctacagtaattacaaacctattatcagctatcccttacattgggactaccctagtcgaatgaatctgaggaggcttctcagtagacaaagcaaccctaacacgcttcttcgcattccacttcatcctcccattcattatcgccgcccttgcaattgtacatcttcttttcctccacgaaacaggatcaaataaccccacaggattaaactccgacgcagacaaaatcccattccatccatattatacaattaaagacctcctaggtgtatttatattactattattcctaataaccctagtactattcttcccagacctactaggagacccagacaattatacacccgctaaccccctcaacaccccaccccacatcaaaccagaatgatactttctctttgcctacgctattctacgctccattcccaacaaactaggaggggtcgtagccctaatcttatcaatcctaatcttagccttcctaccattcctgcatacctcaaaacaacgcagcttaacattccgcccaatcacccaaatcctttactgaatcctagtagccaacctcctagtcttaacatgaatcggaggccaaccagtagaacacccatttatcattattggtcaactagcctccatcagttatttttcaattatcctcattctcataccaatctctggaattgttgaagacaaaatgttaaaatgaaattaatgtcccgatagtataaaaattactctggtcttgtaaaccaaaaatgaagagtcagtcttctcaggacaatcaagaagaaggaactacctccccaccatcaacacccaaagctgatattctacttaaactacttcttgtcagtacataaaatgatatggacattaaaacatttatgtatatcgtacattaaattattttccccaagcatataagcatgtaatatatatctaatgatttaggacatacatttaaactcaactataaattcacaacaacatgtctattctcaaatacattaagataatgcttattagacatatctgtgttattagacatgcaccattaagtcataaacctttctcttccatatgactatccctgtccccaattggtctctatttctaccatcctccgtgaaatcaacaacccgcccactcgtccccctcttctcgctccgggcccattcgtcctgggggtgactatactgaaactttaccaggcatctggttcttacttcagggccatcaattggttcatcgtccatacgttccccttaaataagacatctcgatggtaacgggtctaatcagcccatgatcaacataactgtggtgatatacatttggtattttttaattttcggatgccttcctcaacatagccgtcaaggcatgaaggtcagcacaaagtcctgtggaaccttttagttaagggtcatttatcctcatagacaaagctcgaaagactattttattcatgtttgtaagacataaatatttataaatactgaaaaatctgtcaacaaacccccccaccccctacacctgaaacttcaatgccaaaccccaaaaacattaaagcaagaattaaataaaacaaaaagctacttaattcttaaaaggcttctccattctagtagaccacaaaattttaacttaaatcttagcattggtaaaatttcccgacacaaaatctttcctcctaactaaaccctctttacttgcctaccctcagaaaattccacatacaccaaa

SEQ ID NO: 3414 - DNA, 435 bp, Rattus norvegicus
  Genbank Accession No. X15512
ggatcatagtggtgggaggtggtgggtactagtgatgccccctatccgcgcgcgtctgcctccagggtgcccctccagccaggatgaggctcttcatcgcacttcctgtcctgatcgtggtcgtagccatggctttggaaggcccagcccctgcccaggcggcccctgacttttccagcgcaatggagagcttaccggataaactaaaagagtttgggaacactttggaagataaggcccgggcagccattgagcatatcaaacagaaggaaattatgatcaagactcggaactggttttcagagacgctcaacaaaatgaaggagaaattaaaaaccacatttgcctgagtgcctggcgagccacctcgcagcagcaaagagggccacgtgacgggccaggtccctcttcaaataccaataaaaacttgtagag

SEQ ID NO: 3415 - DNA, 862 bp, Rattus norvegicus
  Genbank Accession No. X15679
gcactaggaacaccatgaagatcagcatcttctttgcttttctcggagctgctgttgctctccctgttaatgatgatgacaagattgttggaggctacacatgtccgaagcatttggttccttaccaggtgtctttgcatgatggcattagccaccagtgtggtggctcccttatcagtgatcagtgggtactgtctgctgctcattgctataaaaggaaactccaggttcgccttggtgaacacaatattcatgttcttgagggtggagagcaattcattgatgcagaaaagatcattcgacaccctgagtataacaaggacactctggacaatgacatcatgctgattaaattgaagtcacctgccgtccttaactcccaagtatctacggtctctctgcccagatcctgtgcatctacagatgctcagtgccttgtgtctggctggggaaacactgtgagcattggtggtaaatacccagcactccttcaatgcctggaagcccctgtcctctctgctagttcttgcaaaaaatcctacccaggccagatcaccagcaatatgttctgcctgggcttcctggagggtggaaaggactcctgtgatggtgactctggtggccctgttgtctgcaatggagagatccagggcattgtctcctggggttcagtctgtgcaatgagagggaagcctggtgtttacaccaaagtctgcaactacctgagctggattcaggagactatggcgaacaactgagttctcttacctttcgtaaatcaccggttcactatccatttccctttcttcctatacctgaaatgaggttaaaataaataattttctcctgctctaaaaaaaaa

SEQ ID NO: 3416 - DNA, 1840 bp, Rattus norvegicus
  Genbank Accession No. X15734
cgagaaactacaggcaaactttcagctttgaagttgtcaccttggagaagtgaagtcgagaagtgtgacaccatgaatggacctgtggatggcttgtgtgaccattctctaagtgaagagggagccttcatgttcacatctgaatcggtaggagaagggcatccagataagatctgtgaccagattagtgatgcagtgctggatgcccatctcaagcaagaccccaatgccaaggtggcctgtgagacagtgtgcaagacagggatggtgctcctgtgtggagagatcacctcaatggccatgattgactaccagcgggtggtgagagacaccattaagcacattggctacgatgactctgccaagggcttcgacttcaagacctgcaatgtgctcgtggctctggagcaacagtccccagacattgcccaatgtgtccatctagacagaaatgaggaggacgttggtgcaggagatcagggtctgatgttcggctatgccactgacgagacagaggagtgcatgccgctcaccattgttcttgctcacaaactcaacacccggatggcagatctgaggcgctctggtgtccttccctggctgagacctgattctaagactcaggtaacagttcagtacgtgcaggataatggtgctgtcatccctgttcgcgtccacaccatcgtcatctctgtgcaacacaacgaagacataacactggaggccatgcgagaggccctgaaggagcaggtgatcaaagctgtggtgccagccaagtacctggatgaagacaccatctaccacctgcagccaagtgggcggtttgtcatcggaggtccccagggggatgcaggtgtcacaggccgcaagattattgtggacacatacggaggctggggtgcccatggtggtggtgccttctctggaaaggactacaccaaggtggaccgctcagcagcttatgccgcccgctgggtggccaagtctctggtgaaggctgggctctgccggagagtccttgttcaggtgtcctatgccattggtgtggcagaacctctgtccatttccattttcacctacggaacttccaagaagaccgagcgagacgagctactagaggttgtgaacaagaactttgacctccggccgggtgttattgtcagggacttggatctgaagaagcccatctaccagaagactgcatgctatggtcatttcggaagaagcgagtttccctgggaggtccccaagaagcttgtgttttagagctgccgggaagcttagctctgtcctatactcaacctcctcaagatctcaactccctggtctcagagagccctccctgcttcccaccctatgcaaagccagcttcctccgattttccccctacccggcaatctgcaaacatcttaatagtggcaaggcaggtggtttctggtgctaggtcatcaggtctccttgcaaggatagtcagtgttccctccctgtctctcagatgacaacaatgttaattttgtgtaaaagttgctcctgtcatcccctcccgtagtctgaagctaaccaggccatctcttcctccgtcctggacatgtgcccagatgaatgttttgtcccatatctctggcttcccctttacattggcagccagaggtcctgagccggggcttcctcagggtccctctgagactgggcatctgctccctaggatatggtcagtgtcccctgaacatctgcattctgtgagggactgagctgtgtgttcttcatcccaacacaataaggtggtatcgtcattatccacagtgacagatggggaaactgaggctcagagagcgagctc

SEQ ID NO: 3417 - DNA, 1454 bp, Rattus norvegicus
  Genbank Accession No. X15958
gtctctccgccatggcggccctgcgtgctctgctgcccagagcctgcaactcgctgttgtccccagttcgctgcccagaattccggcgcttcgcctcgggtgctaactttcagtacatcatcacggaaaagaaaggaaagaatagcagcgtggggctgatccagttgaaccgtcccaaagcactcaatgcactttgcaatggactgattgaggagctcaaccaagcactggagacctttgaggaagatcccgctgtgggcgccattgtgctcactggtggggagaaggcctttgcagccggagctgacatcaaggaaatgcagaaccggacatttcaggactgttactcaggcaagttcctgagccactgggaccatatcacccggatcaagaaaccggtcatcgcggctgtcaatggctatgctcttggtgggggctgtgaacttgccatgatgtgcgatatcatctatgctggtgagaaagcccagtttggacagccagaaatcctcctggggaccatcccaggtgcagggggcactcagagactcacccgagcagtcggcaaatcactagcaatggagatggtcctcactggtgaccgaatttcagcacaggatgccaagcaagcaggtcttgtaagcaagatttttcccgttgaaacactggttgaagaggccatccaatgtgcagaaaagatcgccaacaattccaagatcatagtagccatggcgaaagaatctgtgaatgcagcctttgaaatgacgttaacagaaggaaataagctggagaagaagctcttctattccacctttgccactgatgaccggagagaagggatgtctgcctttgtggagaaaaggaaggccaacttcaaagaccactgagagctggcagccatacctttctccaccctggagaggaaagctcagcctgtcagagggtagtagtgtctgccacagttcctaccgaagcttcaaggctgtggccacagcttgggtactcctggtgtggcctgcaaccttcaccagttgttggaagtcggtctctcacagttttctaaatcagaaatctgggaagctttcagggtgtcttgatttgtttaacttcactctaaaggcagggcacgcttgggccagccacttccctgtgcactatctgcagtgcatagctcaagatgtgagcttcaagagggaagtggccctgcctgctgattccaagcacgagaattcaatgaaagtaactccttcggtttagtttcgactcgcctgtagttgtctctctagagggtcaatatgttttttaattattattgctatgattttcttatgggtagggttttgctgtgtatccctggctgcctggaagttactgtatagaccaggttgaccttgaattcacagagatcaaccagcctctgcttcccaagtattgggattaaaggtatatgctaccac

SEQ ID NO: 3418 - DNA, 936 bp, Rattus norvegicus
  Genbank Accession No. X16481
gaattccggccgccgccaccgcgccaagttccggccgcggccaccttccgccgtccagggctcctccgcctcggccccgggaccccggctccccgccagccccggccccggcaccatgtcggagaagagcgtggaggcagcggccgagctaagcgccaaggacctgaaggaaaagaaggacaaggtggaggagaaggctggccggaaagaacggaagaaagaagtagtggaggaggaggagaatggagctgaggaggaggaagaagaaactgctgaggatggagaggatgatgatgaaggagacgaagaagatgaggaggaagaggaggaggaggatgaaggccccgtgcggaagagaactgctgaagaggaggatgaagcggatcccaagaggcagaagacagaaaacggggcgtcggcttgagcccctgcccgtgggcttggggatgggaggcccctcaggtcctggaggtggggcaggaacacacaaatccagccccccttctcctggctccctcgtctggccctgccccagagctgtgacccttgccctttgacccagcctctcatttccatctctccagacactgctccttcaccctcactgccacaggtccagcccccaacccgcctcatccaagctccccagccggccctcacttgccctagcattccttgttcttccctgccttcctcaccatcgatctgttccagtccttgcgaagcctctccttcccctctgcaccccgagcctctcagcctgcccttctctctcctgcctgacccctgggtctccctcagattccctcctctcagacagcgccaggccggggtggggctggggttggggccaagccccgaagctgccccctcccctttttgtataatttaataaagaaacggtcgcgcttcaaaaaaaaaaaaaaaacggaattc

SEQ ID NO: 3419 - DNA, 5066 bp, Rattus norvegicus
  Genbank Accession No. X52477
ctaccccttacccctcactccttccacctttgtcctttaccatgggacccacgtcagggtcccagctactagtgctactgctgctgttggccagctccctgctagctctggggagccccatgtactccatcattactcccaatgtcctgcggctggagagtgaagagactttcatactagaggcccatgatgctcagggtgacgtcccagtcactgtcactgtgcaagacttcctaaagaagcaagtgctgaccagtgagaagacagtgttgacaggagccactggacatctgaacagggtcttcatcaagattccagccagtaaggaattcaatgcagataaggggcacaagtacgtgacagtggtggcaaacttcggggcaacagtggtggagaaagcggtgctagtaagctttcagagtggttacctcttcatccagacagacaagaccatctacaccccaggctccactgttttctatcggatcttcactgtggacaacaacctattgcctgtgggcaagacagtcgtcatcgtcattgagaccccggacggcgttcccatcaagagagacattctatcttcccacaaccaatatggcatcttgcctttgtcttggaacattccagaactggtcaacatggggcagtggaagatccgagccttctatgaacatgcaccaaagcagaccttctctgcagagtttgaggtgaaggaatacgtgctgcccagtttcgaagtcctggtggagcctacagagaaattttattacatccatggaccaaagggcctggaagtttccatcacagccagattcctgtatgggaagaacgtggacgggacagctttcgtgatctttggggtccaggatgaggataagaagatttctctggccctgtccctcacccgcgtgctgatcgaggatggttcaggggaggcagtgctcagccgaaaagtgctgatggacggggtacggccctccagcccagaagccctagtggggaagtccctgtacgtctctgtcactgttatcctgcactcaggtagcgacatggtagaggcagagcgcagtgggatcccaattgtcacttccccgtaccagatccacttcaccaagacacccaaattcttcaagccagccatgcctttcgacctcatggtgtttgtgaccaaccctgatggctctccagcccgaagagtgccagtagtcactcagggatccgacgcgcaggctctcacccaggatgacggtgtggccaagctgagcgtcaacacacccaacaaccgccaacccctgactatcacggtaagcaccaagaaggagggtatcccggacgcgcggcaggccaccaggacgatgcaggcccagccctacagcactatgcacaattccaacaactacctgcacttgtcagtgtctcgggtggagctcaagcctggggacaacctcaatgtcaacttccacctgcgcacggacgctggccaagaggccaagatccgatactacacctatctggttatgaacaaggggaagttactgaaggcaggccgtcaggttcgggagcctggccaggacctggtggtcttgtcactgcccatcactccagaatttataccttccttccgcctggtggcttactacaccctgattggagctaatggccaaagggaggtggtggccgactcagtgtgggtggatgtgaaggactcctgtgtaggcacgctggtggtgaaaggtgacccaagagataaccgacagcccgcgcctgggcatcaaacgacactaaggatcgaggggaaccagggggcccgagtggggctagtggctgtggacaagggggtgtttgtgctgaacaagaagaacaaactcacacagagcaagatctgggatgtagtagagaaggcagacattggctgcaccccaggcagtgggaagaactatgcgggtgtcttcatggatgctggcctgaccttcaagacaaaccaaggcctgcagactgatcagagagaagatcctgagtgcgccaagccagctgcccgccgccgtcgctcagtgcagttgatggaaaggaggatggacaaagctggtcagtacaccgacaagggtctgcggaagtgttgtgaggatggcatgcgtgatatccctatgccgtacagctgccagcgccgggctcgcctcatcacccagggcgagagctgcctgaaggccttcatggactgctgcaactatatcaccaagcttcgtgagcagcacagaagagaccatgtgctgggcctggccaggagtgatgtggatgaagacataatcccagaagaagatattatctctagaagccacttcccagagagctggttgtggaccatagaagagttgaaagaaccagagaaaaatggaatctctacgaaggtcatgaacatctttctcaaagattccatcaccacctgggagattctggcagtgagcttgtccgacaagaaagggatttgtgtggcagacccctatgagatcacagtgatgcaggacttcttcattgacctgcgactgccctactctgtggtgcgcaatgaacaggtggagatcagagctgtgctcttcaattaccgtgaacaggagaaacttaaggtaagggtggaactgttgcataacccagccttctgcagcatggccactgccaagaagcggtactaccagaccatcgaaatccctcccaagtcctctgtggctgtgccttatgtcattgtccccttgaagatcggcctccaggaggtggaggtcaaggccgccgtcttcaaccacttcatcagtgatggtgtcaagaagatactgaaggtcgtgccagaaggaatgagagtcaacaaaactgtggctgtccgtacactggatccagaacacctcaatcaagggggagtgcagagggaggatgtgaatgcagcagacctcagtgaccaagtgccagacacagattctgagaccagaattctcctgcaagggaccccggtggctcagatggccgaggacgctgtggacggggagcggctgaaacacctgatcgtgaccccctctggctgtggggagcagaacatgattggcatgacacccacggtcattgcagtacactatctggatcagaccgaacagtgggagaaattcggcctagagaagaggcaagaagctctggagctcatcaagaaagggtacacccagcagctggctttcaaacagcccatctctgcctatgctgccttcaacaaccggcctcccagcacctggctgacagctatgtggtcaaggtctttctctctggctgccaacctcatcgccatcgactctcaggtcctgtgtggggctgtcaaatggctgattctggagaaacagaagccagatggtgtctttcaggaggacggaccagtgattcaccaagaaatgattggtggcttccggaacaccaaggaggcagatgtgtcgcttacagcctttgtcctcatcgcactgcaggaagccagagatatctgtgaggggcaggtcaacagccttcccgggagcatcaacaaggcaggggagtatcttgaagccagttacctgaacctgcagagaccatacacagtagccattgctgggtatgccctggccctgatgaacaaactggaggaaccttacctcaccaagtttctgaacacagccaaagatcggaaccgctgggaggagcctggccagcagctctacaatgtggaggccacctcctacgccctcctggccctgctgctgctgaaagactttgactctgtgcctcctgtggtgcgctggctcaacgacgaaagatactacggaggtggctatggctccacgcaggctaccttcatggtattccaagccttggctcaataccgggcagatgtccctgaccacaaggacttgaacatggatgtgtccctccacctccccagccgcagctccccaactgtgtttcgcctgctatgggaaagtggcagtctcctgagatcagaagagaccaagcagaatgagggcttttctctgacagccaaaggaaaaggccaaggcacactgtcggtggtgacagtgtatcacgccaaagtcaaaggcaaaaccacctgcaagaagtttgacctcagggtcaccataaaaccagcccctgagacagccaagaagccccaggatgccaagagttcgatgatccttgacatctgcaccaggtacttgggagacgtggatgctactatgtccatcctggacatctccatgatgactggctttattccagacacaaacgacctggaactgctgagctctggagtagacagatacatttccaagtatgagatggacaaagccttctccaacaagaacaccctcatcatctacctagaaaagatctcacactccgaagaagactgcctgtccttcaaagtccaccagttctttaacgtgggacttatccagccggggtcggtcaaggtctactcctactacaatctagaggagtcatgcacccggttctatcatccggagaaggacgatggaatgctgagcaagctgtgccacaatgaaatgtgccgctgtgccgaggagaactgcttcatgcatcagtcacaggatcaggtcagcctgaatgaacgactagacaaggcttgtgagcctggagtggactacgtgtacaagaccaagctaacgacgatagagctgtcggatgattttgatgagtacatcatgaccatcgagcaggtcatcaagtcaggctcagatgaggtgcaggcaggtcaggaacgaaggttcatcagccacgtcaagtgcagaaacgccctaaagctgcagaaagggaagcagtacctcatgtggggcctctcctccgacctctggggagaaaagcccaataccagctacatcattgggaaggacacgtgggtggagcactggcccgaggcagaggaacgtcaggatcagaagaaccagaaacagtgcgaagacctcggggcattcacagaaacaatggtggttttcggctgccccaactgaccaccacctccaataaagcttcagttgtatttt

SEQ ID NO: 3420 - DNA, 466 bp, Rattus norvegicus
  Genbank Accession No. X52619
ctttccgtctccggccgccgcaggagaggagtcgccgccatgtccgcgcatctgcaatggatggtcgttcggaactgctccagtttcttgatcaagaggaataagcagacgtacagcacggagcccaataatctgaaggcccgaaactccttccgctacaacgggctaattcaccgcaagacggtcggagtggaggcctggcctgatggcaaaggggtcgtggtggttatgaaacgcagatccggtcagcgaaaacctgccacttcctacgtgaggaccaccatcaacaagaatgctcgggctaccctcagcagcatcaggcacatgatccgaaagaacaagtaccgccctgatctgcgtatggcggccatccgcagagccagtgccatccttcgaagccagaagcctgtggtggtgaagaggaaacggacccgccccaccaagagctcctgagccccacaccccg

SEQ ID NO: 3421 - DNA, 453 bp, Rattus norvegicus
  Genbank Accession No. X52733
ccgccatgccatccagactgaggaagacccggaaactccggggccacgtgagccacggccacggtcgcatcggtaagcaccgcaagcacccaggaggccgcgggaatgctggaggcatgcatcaccacaggatcaactttgacaaatatcatccaggttacttcggcaaagttggcatgaggcattaccacttgaagaggaaccagagcttctgcccaactgtcaacctggataaattatggacgttggtcagcgagcagacacgggtcaatgcagcaaaaaacaagaatggagttgctcccatcattgacgttgttcgatcaggctactacaaagttctggggaaggggaagctccctaagcaacctgtcatcgtgaaggccaagttcttcagcagaagagctgaagagaagataaagggtgtgggaggtgcctgtgtcctggtggcttaag

SEQ ID NO: 3422 - DNA, 4620 bp, Rattus norvegicus
  Genbank Accession No. X52984
taagctctgtcctcctgtcctcctgtcatcctgtcctcctgtccttccatcatgaagaagaatagagaggctcagctgtgccttttttcagctcttcttgccttcctgccctttgcttccttgctcaatggaaactcgaagtatatggtgctggtcccttcccagctctacaccgagacccctgagaaaatctgcctgcatctataccatctgaatgagacagtgactgtgacagcttccttgatatctcaaaggggaacgagaaaactgttcgatgagcttgtggttgacaaggacttgttccactgtctttccttcactatccctagattgccctcttctgaagaggaggagtcactcgacatcaacattgaaggggcaaagcataaattcagcgaaaggcgtgtggtgcttgtgaagaacaaagaaagtgttgtctttgtccagactgataagcccgtgtacaagccaggacagtcagttaaatttcgggttgtctctatggataaaaatctacaccccctgaatgagttgtttcctctggcttacattgaggatccgaaaatgaaccgaattatgcagtggcaggacattaagacagagaatgggcttaagcaattgtccttcagcctgtcagcagagcccattcagggcccctacaagatagtgattctcaaacagtcaggagtgaaggaagagcattccttcaccgtcatggaattcgtgcttcccagatttggtgtcgatgtgaaggtcccaaacgccatctctgtgtacgatgaaataatcaatgtgactgcctgtgcgatatatacctatgggaagcctgttccaggacatgtaaagataagtctttgccatggaaatccttcctttagctctgagacaaagtctgcatgcaaagaagaggactccgagctagacaacaacggctgcagcacacaagaagtgaacatcactgagttccaattaaaggaaaattacctcaaaatgcaccaggctttccatgtgaatgcaactgttacagaagaagggacagggtcagagttcagtggatctggaagaattgaagtcgaaagaaccagaaacaaattcctatttctgaaagcagactcacacttcagacacgggatcccattctttgtgaaaatccgcctagtggatatcaagggagatcctatcccaaatgagcaggtcttcatcaaagcacaagaagctggctacaccaatgctactaccactgatcagcatggcttggcaaagttctccatagataccagcagcatctcaggctattccctcaatatcaaagtctaccacaaggaggaaagttcatgtatccattcctcttgcacagcagaaagacacgcagaggaacatcatacggcctatgctgtttactccctcagcaagagctacatctaccttgacacagaagctggcgtcttgccctgcaaccagatccacacagttcaggcgcattttattctgaaggggcaggtcttgggagtgctgccacagattgttttccactacctggtcatggcccagggcagcatcctccagactggaaaccacactcatcaagtggagccaggagtatctcaagtacaaggcaacttcgccttggagatccctgtggagttcagcatggttcccgtggctaaaatgctcatctacaccatcttgcctgatggagaagtgattgcagattctgtaacgtttcaagttgaaaaatgtcttcgcaacaaagtgcacctgagcttcagcccatcccaaagtcttccagcctcacaaacccatatgcgggttacagcttctcctcagtccctctgtggcctgagagctgtggaccaaagcgtgctgctgctgaagcctgaggctgagctctccccttccttgatatatgatctaccaggtatgcaagacagcaacttcattccaagttcttatcatccatttgaagacgaatatgattgtttgatgtaccaaccaagagacactgaagagctcacatactcagtaccatatggacgagagaaggatgtctacagatatgtgagggacatgggtttaacagcattcaccaacttgaagatcaaacatcctacatattgttatgaaatgaacatggttgtactatcagcacctgctgtggaatctgaactttcaccaagagggggagagtttgaaatgatgcccttgggagtaaataaaagtccactacctaaagagccaccacgtaaagatccaccacctaaagatccagttattgagaccattaggaattattttcctgaaacctggatctgggatttagtcacagtaaactcctcaggagtgactgaagtggaaatgacagtccctgacaccatcactgagtggaaggctggagccctctgcctgtctaatgacactggtcttggcctctcttctgtggcaactctccaagccttccagcccttctttgtggagctcacaatgccctactctgtgatccgtggagaagccttcatgctcaaggccacagtgatgaactacctccctacaagcttgccgatggctgtgcagctggaagcttctcctgatttcacagctgtcccagtgggaaatgaccaagattcttattgccttggtgccaatgggaggcacacctcatcctggttggtaactcccaaatctttagggaatgtgaatttctctgtgtctgtggaagcacaacagtccccagagctctgtggttctcaggtagccacagtgcctgaaaccgggagaaaggacacagtagtcaaagtcttgatagttgagcctgaaggaatcaagaaagagcataccttcagctcacttctctgcgcatcagatgctgagctgtcagaaacattgtctctgctgcttccaccaacagtagtgaaagattcagccagagcacatttctctgtgatgggtgatatcttgagttcagccataaaaaacacacaaaatcttatccaaatgccctatggctgtggggagcagaacatggtcctttttgctccaaacatctatgttctgaaatatctgaatgaaactcaacagctgacagagaagatcaagtccaaggcccttggttacctcagagctggttatcagagagaactgaactacaaacacaaagatggctcctacagtgcttttggggatcacaatggccagggtcaaggaaacacttggctcacagcctttgtgctcaagtcttttgcccaagctcgagccttcatcttcatcgacgaatcacacatcaccgacgccttcacctggctctccaagcagcagaaggacagtggctgcttcaggagctccggatcactgttcaacaatgccatgaaggggggagtcgatgatgaaatcaccctctctgcctatataaccatggcccttctggaaagttcactcccagacacggatcctgttgtctccaaagccctgggctgcctagaggcatcttgggagaccatagagcaaggaagaaatggcagctttgtgtacaccaagacactgatggcctatgctttcgctcttgcgggaaaccaggaaaagagaaacgaaatcctgaaatcccttgataaggaagctataagggaagacaactccatccactgggaaagacctcagaaacccacaaaatcagagggttatctgtacacaccccaggcttcctctgctgaagtagagatgagtgcctatgtcgtcttagctcgcctcactgcccagccagccccatcccctgaggacctggctttgtcaatgggcaccatcaagtggctcacaaagcagcagaattcccatggcggcttctcctccacacaggacactgtggtggcccttgatgctctgtccaaatacggagcagctactttttccaaaagccagaaaactcctttggtgaccattcaatcttcagggtcattttcccaaaagttccaagtagacaacagtaatcgcctgttactgcagcaggtctcattaccagacattcctgggaactataccgtcagtgtgtcaggggaaggatgtgtgtatgctcagaccacgctgagatacaacatgcccttggagaagcagcagcctgcatttgctctaaaggtgcagacagtacccctgacttgtaacaaccccaaaggccagaacagcttccagatctcactagaaatcagttacacggggagccgtccagcctccaacatggtgattgctgatgtgaagatgctctctggcttcatcccattgaaaccaacagtgaagaagcttgaaagattagagcacgtaagcagaacagaagtgaccaccaacaacgtcctgttatatttggaccaggtaaccaatcagacactgtccttctccttcatcattcaacaagacatcccagtaaagaacctgcagcctgccattgtgaaagtgtatgactactatgagacagatgaagtggcttttgctgaatacagcagcccctgcagctcagacaaacaaaatgtttgaaactcatatctgtggacaaggcattgctggaatccccaaaccagagaactttcaaggtggtgatttgtgtttgtctctgaaatacaaatactgaacaatcttggt

SEQ ID NO: 3423 - DNA, 1882 bp, Rattus norvegicus
  Genbank Accession No. X53363
cgggggccagtgtgccgccgccccctcggcccgccatgctcctttcggtgccgctcctgcttggcctcctcggcctggctgccgcagaccctgccatctatttcaaagagcagttcttggacggagatgcctggaccaaccgctgggtcgaatccaaacataagtctgattttggcaaattcgtcctcagttctggcaaattctacggggaccaggagaaggataaagggttgcagacaagccaagatgcccgattttacgcgctgtccgccagattcgaacccttcagcaacaagggccagacactggtggtacagttcaccgtgaagcatgagcagaatatcgactgtgggggcggctacgtgaagctgtttccgggtggcttggaccagaaggacatgcatggagactcagaatataacatcatgtttggtccggacatctgcggtcctggcaccaagaaggttcatgtcatctttaactacaagggcaagaacgtgctgatcaacaaggatatccggtgtaaggatgatgaattcacacatctatacacgctgattgtgcggccagacaacacctacgaggtgaaaattgacaacagccaggtggagtcgggctccttggaggatgattgggactttctgccgcccaagaagattaaggatcctgacgctgccaagccagaagactgggatgaacgagccaagattgatgaccccacagattccaagcctgaggactgggacaagccagagcacatccctgaccctgatgctaagaagcctgaggactgggacgaagagatggatggagagtgggaaccaccagtgattcaaaatcctgaatacaagggcgaatggaagccacgtcaaattgacaacccagattacaagggtacctggatacacccagagattgacaatcctgaatactcccccgatgcgaatatctatgcctatgatagttttgctgtactgggcttagacctctggcaggtcaagtctggcacaatttttgacaacttcctcatcaccaatgatgaggcctatgcagaggagtttggcaatgagacctggggtgtcaccaaggctgcagagaagcagatgaaggacaagcaggatgaggagcagaggcttaaggaagaagaagaagacaagaagcgtaaagaggaagaggaggccgaggataaagaggatgaggatgacagagatgaagatgaagatgaagaggatgagaaggaagaagatgaggaggatgccactggccaagccaaggatgagctgtagaggccacaccacctgcctccagggctggactgaggcctgaacacccgccacagagctggctgctccaataatgtctctatgagactcaagaacttttcattttttttccaggcaggttcaggtctggggtggattctgatttttgttccccctgcctcccccaatccctcccccaaccccccctttttttttactggtgtttgtctttaattcttcagccctcaacctcctggcctctcatttttgaatcaacattttttctttctgtccctttctccatctcttggtcactatcctccaactctaggaacaggtatggaggaaaagccctaggcttgagatttcatctgctctcctttctgaatctcagaggagggtaggagaagggggtggtatcttccctccccccagcactgaggaagaatggggctcttcccctttctcccttgcccccaggactgggccatttgtggggcagccagttctagcacagctcacactgagagtgtaagaactacaaacaaaatttctattaaattaagttttgtgtcttcaaaaaaaaaaaaaaaaaaaaaaaaaaaaaaaaaaaaaaaaaa

SEQ ID NO: 3424 - DNA, 1474 bp, Rattus norvegicus
  Genbank Accession No. X53428
ttttttcttcgcgggagaacttaatgctgcatttattattaacctagtaccctaacataaaacaaaaggaagaaaaggaccaaggaaggaaaaggtgaatcgagaagagccatcatgtcggggcgaccgagaaccacctcctttgcggagagctgcaagccagtgcagcagccttcagcttttggtagcatgaaagttagcagagataaagatggcagcaaggtaaccacagtggtggcaactcctggacagggtcctgacaggccacaggaagtcagttacacagacactaaagtcattggaaatgggtcatttggtgtggtatatcaagccaaactttgtgactcaggagaactggtggccatcaagaaagttcttcaggacaagcgatttaagaaccgagagctccagatcatgagaaagctagatcactgtaacatagtccgattgcggtatttcttctactcgagtggcgagaagaaagatgaggtctaccttaacctggtgctggactatgttccggaaacagtgtacagagtcgccagacactatagtcgagccaagcagacactccctgtgatctatgtcaagttgtatatgtaccagctgttcagaagtctagcctatatccattcctttgggatctgccatcgagacattaaaccacagaacctcttgctggatcctgatacagctgtattaaaactctgcgactttggaagtgcaaagcagctggtccgaggagagcccaatgtttcatatatctgttctcggtactacagggcaccagagctgatctttggagccaccgattacacgtctagtatagatatgtggtctgcaggctgtgtgttggctgaattgttgctaggacaaccaatatttcctggggacagtggtgtggatcagttggtggaaataataaaggtcctaggaacaccaacaagggagcaaattagagaaatgaacccaaattatacagaattcaaattcccccaaatcaaggcacatccttggacgaaggtctttcggccccgaactccaccagaggcaatcgcactgtgtagccgtctcctggagtacacgccgaccgcccggctaacaccactggaagcttgtgcacattcattttttgatgaattacgggacccaaatgtcaaactaccaaatgggcgagacacacctgccctcttcaactttaccactcaagaactgtcaagtaacccacccctggccaccatccttatccctcctcacgctcggattcaggcagctgcttcacctcctgcaaacgccacagcagcctcagatactaatgctggagaccgtggacagaccaataacgccgcttctgcatcagcctccaactctacctgaacagccccaagtagccagctgcgcagggaagaccagcacttacttgagtgccactcagcaacactggtcacgtttggaaagaaaattaaaaaaaaaa

SEQ ID NO: 3425 - DNA, 2326 bp, Rattus norvegicus
  Genbank Accession No. X53588
ctcagccagacagtcctcacctgcaacaggtggcctcaggagtcaggaacatctctacttccccaacgacccctgggttgtcctctcagagatggctatggatactacaaggtgtggagcccagttgttgactctggtcgagcagatcctggcagagttccagctgcaggaggaagacctgaagaaggtgatgagccggatgcagaaggagatggaccgtggcctgaggctggagacccacgaggaggccagtgtaaagatgttacccacctacgtgcgttccaccccagaaggctcagaagtcggagactttctctccttagacctgggaggaaccaacttcagagtgatgctggtcaaagtgggagagggggaggcagggcagtggagcgtgaagacaaaacaccagatgtactccatccccgaggacgccatgacgggcactgccgagatgctctttgactacatctctgaatgcatctctgacttccttgacaagcatcagatgaagcacaagaaactgcccctgggcttcaccttctccttccctgtgaggcacgaagacctagacaagggcatcctcctcaattggaccaagggcttcaaggcctctggagcagaagggaacaacatcgtaggacttctccgagatgctatcaagaggagaggggactttgagatggatgtggtggcaatggtgaacgacacagtggccacaatgatctcctgctactatgaagaccgccaatgtgaggtcggcatgattgtgggcactggctgcaatgcctgctacatggaggaaatgcagaatgtggagctggtggaaggggatgagggacgcatgtgcgtcaacacggagtggggcgccttcggggactcgggcgagctggatgagttcctactggagtatgaccggatggtggatgaaagctcagcgaaccccggtcagcagctgtacgagaagatcatcggtgggaagtatatgggcgagctggtacgacttgtgctgcttaagctggtggacgagaaccttctgttccacggagaggcctcggagcagctgcgcacgcgtggtgcttttgagacccgtttcgtgtcacaagtggagagcgactccggggaccgaaagcagatccacaacatcctaagcactctggggcttcgaccctctgtcaccgactgcgacattgtgcgccgtgcctgtgaaagcgtgtccactcgcgccgcccatatgtgctccgcaggactagctggggtcataaatcgcatgcgcgaaagccgcagtgaggacgtgatgcgcatcactgtgggcgtggatggctccgtgtacaagctgcacccgagcttcaaggagcggtttcacgccagtgtgcgcaggctgacacccaactgcgaaatcaccttcatcgaatcagaggagggcagcggcaggggagccgcgctggtctctgcggtggcctgcaagaaggcttgcatgctggcccagtgaaatccaggtcatatggaccgggacctgggttccacggggactccacacaccacaaatgctcccagcccaccggggcaggagacctattctgctgctacccctggaaaatggggagaggcccctgcaagccgagtcggccagtgggacagccctagggctctcagcctggggcagggggctgggaggaagaagaggatcagaggcgccaaggcctttcttgctagaatcaactacagaaaatggcggaaaatactcaggacttgcactttcacgattcttgcttcccaagcgtgggtctggcctcccaagggaatgcttcctggaccttgcaatggcctggcttccctgggggggacacaccttcatggggaggtaacttcagcagttcggccagaccagaccccaggagagtaagggctgctagtcacccagacctggctgttttcttgtctgtggctgaagaggccggggagccatgagagactgactatccggctacatggagaggactttccaggcatgaacatgccagagactgttgccttcatatacctccacccgagtggcttacagttctgggatgaaccctcccaggagatgccagaggttagagccccagagtccttgctctaaggggaccagaaaggggaggcctcactctgcactattcaagcaggaatcatctccaacactcaggtccctgacccaggaggaagaagccaccctcagtgtccctccaagagaccacccaggtccttctctccctcgttcccaaatgccagcctctctacctgggactgtgggggagtttttaattaaatatttaaaactacttca

SEQ ID NO: 3426 - DNA, 1481 bp, Rattus norvegicus
  Genbank Accession No. X53944
ctctgaagagcctgatttagcccacattgctgtctgtcttttcctaggaacattttggagtcgcgttcctctgtgtgggccatggcacctctgagccagataagcacccacctcaactccacctgcggggcagaaaactccactggcgtcaaccgggcccgtccgcacgcctactacgccctgtcctactgtgctctcatcctagccatcatctttggcaacggcctggtatgtgctgctgtgctgagggagcgtgccctgcagaccaccaccaactacctagtggtgagcctggctgtggccgacctgctagtggccacgttggtgatgccgtgggtggtgtacttggaggtgacaggtggagtctggaatttcagccgcatttgctgtgacgtttttgtcaccctggatgtcatgatgtgtacagccagcatcctgaacctctgtgccatcagcatagacaggtacacagcggtggtcatgccagttcactatcagcacggcaccgggcagagctcctgtagacgtgtggcactcatgatcacagctgtgtgggtgctggcttttgctgtgtcctgccctctcctctttggtttcaacacaacaggggatcccagcatctgctccatctccaaccctgattttgtcatttactcttcagtggtgtccttctacgttcccttcggggtgactgtcctggtctatgccaggatctacatagtcctgaggcaaaggcaaagaaaacggatcctcactcgacagaacagccagtgcatcagtatcagacctggctttcctcagcagtcttcctgtctgaggctgcatcccattcggcagttttcaataagggccaggtttctgtcagatgccacaggacaaatggagcacatagaagacaaacaatatccccagaaatgccaggacccccttttgtcacacctgcagcccccctcacctggtcagacacatggggggctgaagcgctactacagcatctgccaagacactgccttgagacacccaagcttggaaggcggggcagggatgagccccgtggaaaggactcggaactccttgagccccaccatggcacccaagctcagcttagaggttcgaaaactcagcaacggcaggttatccacgtccctgaggctggggcccctgcagcctcggggagtaccacttcgagagaagaaggccacccagatggtggtcattgtgcttggagccttcattgtctgctggctgcccttcttcctgactcacgttcttaatacccactgtcaagcatgccacgtgtccccagagctttacagagccacaacgtggctaggctatgtgaacagtgccctgaatcctgtgatctataccaccttcaatgtggagttccgcaaagccttcctcaagatcctgtcctgctgaaggaggagaagagaccgcactcctttaccacttcgagatgccaggcagtttgaaccctg

SEQ ID NO: 3427 - DNA, 1934 bp, Rattus norvegicus
  Genbank Accession No. X54467
cctataagccggcgacctctggcattaagctttgctctcttcgggccgtcgcgaccatgcagacccccggcgtcttgctgctcattctcggcctcctggatgcgtcctcctccgcgcttatcagaatccccctgcgcaagttcacatccatccgtcggactatgacggaagtgggaggctctgtggaagacctgatccttaaaggtcccataaccaagtactccatgcagtcatctcctaggaccaaggagccagtgtcagagttactaaaaaactacctggatgcccagtactatggtgagatcggcattgggactcccccacagtgtttcacagtcgtctttgacactggctcctctaacctgtgggtcccctccattcattgcaagctgctggacatagcctgctgggtccaccacaagtacaacagtgacaagtccagcacctatgtgaagaatggcacatccttcgacatccactacggctcaggtagcctctctgggtacctgagccaggacactgtgtcggttccatgtaagtcagacttaggaggtatcaaggtggagaaacagatctttggggaagccaccaagcagcctggagtcgtattcatcgcagccaagtttgatggcatcttgggcatgggctacccttttatctctgttaacaaggtgctcccggtcttcgacaacctgatgaaacagaagctggtggaaaagaacatcttctccttctacctgaacagggacccaaccgggcaacctggaggagaactaatgcttggcggcactgactccagatactaccacggggagctgtcctacctgaacgtcacccgaaaggcctactggcaggtgcacatggaccagctggaggtgggcagcgagctgaccctgtgcaagggaggctgtgaggctattgtggacacagggacgtctcttctggtggggcctgtggacgaggtgaaggaactacagaaggccattggggcagtgcctctcatccagggcgagtatatgatcccttgtgagaaggtgtccagcctgcccattatcacctttaagctaggaggccaaaactatgaactacacccagagaagtacatactcaaggtatcgcaggctggaaagacgatctgcctgagtggcttcatggggatggacataccccctcccagtgggccgctctggatcctgggcgatgtctttattggctgctactacaccgtgtttgacagagaatacaatagggtcggctttgccaaggctgccacactctaacttgctccttcttcactgtcagggaactggatcagagtccagtagagaaagccagccagccccatccctccacctgccccactcacacatattcacactcgcctagtgttgctgggcccttgggaggcctggctggagctggtccagctgttctgttctgtggtccctgtccctgggttcagattgctgccctccgcctgtctgaaggaggccaaggcctacccagtacaaaaggctgcctttaaaggcccctactggcttggtagctgccgggatgaattgtcttgtcctgctgccctttgctgcgtgggcagcactctgaagcaggcaaatgggtcttgggatccctcccagaaacctgctctgaccagaccctcaggcagcctggggatggcaccaagctctactgccccactatctctggcctggcaaaggctgaaggtgagcagaaggagcaagaggacagaagcaaaactatatgaacctggggggggttacctgggacctgaccccaccctcctgggaaggcatgcttcagcctggggcagaggtaggatggctgactggttttggctggcctctgctgccctcatcctgggctagtcagatgggagccaaagttgatatacaaataaagttgttttgggcctcttt

SEQ ID NO: 3428 - DNA, 573 bp, Rattus norvegicus
  Genbank Accession No. X54510
gcttcctgtccggtgagcgtcgaacgactgaagcggtggcccatagtgcattgcgatggcgggtaggcgtgtgtaggcggagccagggccggaagtagaacggtggcggcggcggtgactctggcagctcgggactcagtgcaagtaccacagactcaaccatgactgttcagaggatcttcaggctctcctctgtccttcggtcagcagtctctgtgcatttgaggaggaacattggtgttacagctgtggcgtttaataaggaacttgatcctgtacagaaactcttcttggacaagataagagagtacaaagcaaagcgactggcgtctggaggacctgttgatactggcccagaatatcagcaagaggtggacagagagctttttaagcttaaacaaatgtatggtaaaggagagatggataagtttcctaccttcaattttgaggatcccaaatttgaagtcctcgacaaaccccagtcctgaggaacatacaaaccatgtggtaatttgtcatgacttagttgtacaattaatctaaaaaattcaaataaacattcacttcacagct

SEQ ID NO: 3429 - DNA, 1159 bp, Rattus norvegicus
  Genbank Accession No. X55286
  misc_feature (1)..(1159): n = a or c or g or t
ccgattaggtccccaaaacgggggacgtccatggggatgaacatgatttccaagggtacggagaaagcacttctgaagcttcaagagttctttcctgagctgcagattctggcggtcagtggtaactattgcaccgacaagaaacctgctgccataaactggatcgaagggagaggaaagactgtggtttgtgaagctgtcattccagccaaggtggtgagagaagtattaaagagcactacggaagctatggttgacgtaaacattaataagaatcttgtgggctctgccatggctggtagcataggaggctacaacgcccatgctgccaacatcgtcactgccatctacattgcatgtgcccaggatgcagcacagaatgtggggagttcaaactgtattactttaatggaagcaagtggtcccncnnntgaagacttgnnnnncagctgnnncatgccgtctatagagatcggaaccgtgggtggtgggaccaaccttctacctcagcaagcctgcctgcagatgctaggtgttcaaggggcgtgcaaagacaatcctggagaaaatgcacggcagcttgcccgaattgtgtgtggcactgtaatggctggtgagttgtccttgatggcagcattggcagcaggacatcttgtcagaagtcacatggttcacaacagatcaaagataaatttacaagatctgcagggaacatgcaccaagaaggcagcttgagcatcctgacatacttgaactgaaacacgggcattgggttctcaaggtctaacatgaaatctgtgaattaaaaatgtcagtgcagtgtcttgtggaagatgaacgtgatcagtgagcctgcttggtttctggctctttcagagacgtctgcggtcctttgcaccagactcctcagacgtgggaactatggttctttccgtgccgtattctagaaagatctcatgtggatgtcatggtgctctgagcaccacagatgtgactgcagctcgtttctaaaagctgccacaagctggaagctggtgttttgacgaaatgatggatcttggtgatcagtgtggggctcacctccaatgggttaaaatggagttttaaatgacactgtagctgacagaactctcgatttttatttattcagtctgggcgg

SEQ ID NO: 3430 - DNA, 1094 bp, Rattus norvegicus
  Genbank Accession No. X55969
acaattgatgctgtggtgaaatacgataagaaccaagatgtccacactatcagcctcccattcttccaaagcctgccagattatttggagagaaatcgaagaggaattataagtctactggaagccatgaagggggaattacaacgcctcagtgttgatcagtttgtgaggaaatatagagtggccctgagcaggcttcctcagcagattcatgattatctgaatgcatctgactgggagagacaagtagctggtgccaaggaaaaattaacttctttcatggaaaactatagaattacagataatgatgtactaattgccttagatagtgccaaaatcaacttgaatgaaaaactctctcaacttgagacatacgcgatataatttgatcagtatattagagataattatgatgcacaggacttaaaaagaactattgctcagattattgatagaatcattgaaaagctaaaaatgcttgacgaacagtatcatatccgtgtaaatctagcaaaatcaatccataatctctatttatttgttgaaaatgttgatcttaaccaaatcagtagtagtggtgcgtcttggatccaaaatgtggataccaaatatcaaatcagaatccagatacaagaaaaactccagcatctcagaacacagattcataatatagacattcaacagcttgctgcagagttaaaacaacagattgaagctcttgatgtcccaatgcatttagatcaactgagaactgcaattctattccaaagaataagtgtcattattgagcgtgtcaaatactttgttatgaatcttattgaagattttaaagtaactgagaaaatcaatacttttagagttatagtccgtgagttaattgagaaatatgaagtagaccgacaaatccaggttttaatggataaatcaatagagttggcccacagatacagcctgagtgagcctcttcagaaactaagtaatgtgctacagcaaattgagataaaagactactatgataaattggttggttttattgatgacactgtcgagtggattaaagcagtgtctttcaaaaatatcattgaagagcggcc

SEQ ID NO: 3431 - DNA, 1066 bp, Rattus norvegicus
  Genbank Accession No. X56133
gtggctgaccgccagatgtctctgctgctccgccgacccccgggtcgagaggcctatcccggtgatgtgttttacctacactctcgcctgctggagagagcagccaagatgaacgattcctttggtggtggctctttgactgccttaccagtcattgaaacacaggctggtgatgtgtccgcctacattccaacaaacgttatttccatcaccgatggacagatcttcttggaaacagaattgttctataaaggcatccgccctgccattaatgtgggcttgtctgtgtcccgtgtcggatctgccgcccagaccagagccatgaagcaggtggcaggcaccatgaagctggagttggcccagtaccgggaggtcgctgcttttgcccagtttggttctgatctggatgctgccactcagcagctcttgagccgtggcgtgcgcctgaccgagctgctaaagcaaggacagtactctcccatggctattgaagaacaggtggctgtcatctatgcaggcgtccggggttatcttgataaactggagcccagtaagatcacaaagttcgagagtgctttcttgtctcatgttgtgagccagcaccagagcctcttgggcaatatcaggtctgatgggaaaatctcagaacagtcggatgcaaagctgaaggaaatcgtaacaaacttcttggctgggtttgaaccttaaagccctgccactgtcaccagacactgctttggttttgtcatttattgtggtaaaatcagcaccatttgtaaaggtttactcttgtactccctgatgtacagaaatcacatgaataaaagttccatattgagtgctagtttgtgtgggacgggctcagatgtatcctgggacttgtggaggtcagagagcagcctgtaggagtcagtgccctcctttccctgggaatttaactcaggttattatttaaagctcgacttcaggggttggggatttagctcagtggtagagcgcttgcctaggaagcgcaaggccctgggttcggtccccagctccggaaaaaaaagaaccaacccgaatt

SEQ ID NO: 3432 - DNA, 999 bp, Rattus norvegicus
  Genbank Accession No. X56228
catcaggtgctctaccgagcgctggtctccaccaagtggctggcggaatccattcggtccggcaaggtggggccaagccttcgggtgctggacgcgtcatggtactcaccagggacccgccaggcacgcaaagagtaccaggagcgacacgtgcctggcgcgtccttctttgatatagaggagtgccgggacacgacttcgccttacgagatgatgctgcccagtgaggcccactttggggactacgtgggcaacctgggcataagcaacgacacacacgtcgtggtatacgatggagacgacctgggcagcttctatgcacccagagtatggtggatgtttcgtgtgtttggccaccgcacagtatcagtgctcaatggtggcttccggaactggctgaaggagggccacccggtgacatctgaaccctcgcggccagagccagccgttttcaaagccacactgaaccgctccctgctcaagacctatgagcaggtcctggagaacctccagtctaaaaggttccagctggtggattctcgggcccagggacggtacctgggcacacaaccggagcccgatgcagtaggactggactcaggccacatccgtggctctgtcaacgtgcccttcatgaacttcctgacagaagatggcttcgagaagagcccagaggagctgcgtgccatattccaggacaagaaggtggacctctcccagccccttatcgccacatgccgcaaaggggtcactgcttgccacattgccctggctgcctacctttgtggcaagcccgatgtggctgtttacgatggctcctggtcagagtggtttcgcagggcccccccggagacccgtgtgtcccaggggaagagtgggaaggcctgagtgtgtgcagcctcctcttccgcccaccagatccagccagttcccttcagtcaggcttgtatgacctgctgaaggttcgcctcttacgcaatggagattgacaggatttta

SEQ ID NO: 3433 - DNA, 2674 bp, Rattus norvegicus
  Genbank Accession No. X57523
  misc_feature (1)..(2674): n = a or c or g or t
cgcggagagttccaggctgggaccggactctggacagcgcacgctcgatggctgcgcacgcctggccgacggccgccttgctgctgctgctggtggactggctgctgctgcggcccgtgctcccgggaatcttctccctgttggttcccgaggtgccactgctccgggtctgggccgtgggcctgagtcgctgggctatcctgggactaggggtccgcggggtcctcggggtcaccgcgggagcccgtggctggctggctgctttgcagccgctggtggcggcgctgggtttggccctgcctggacttgcctcgttccgaaagctgtccgcctggggagcactccgggagggtgacaacgctggactgctccactggaacagtcgcttagatgccttcgttctcagttatgtggccgcattgcccgcagctgccctgtggcacaagttggggggcttctgggcgcccagtggccacaagggcgctggagacatgctgtgtcggatgctaggcttcctggactccaagaaggggcgtctccacctggttctggttctcttgatcctctcctgccttggggaaatggccattcccttcttcacaggccgcatcactgactggatccttcaggataagacagcccccagcttcgcccgcaacatgtggctcatgtgtattcttaccatagccagtacagtgctggagtttgcaggagatggaatctacaacatcaccatgggccacatgcacagccgcgtgcatggagaggtgtttcgggccgtccttcaccaggagacaggatttttcctgaagaacccaacaggttccatcacatctcgggtgactgaggacacctccaacgtgtgcgagtccattagtgacaagctgaacctgttcctgtggtacctggggcgaggcctgtgtctcctggcgttcatgatttgggggtcattctacctcactgtggtcaccctgctcagcctgcctctgcttttccttctgcccaggaggctggggaaagtgtaccagtcactggcagtgaaggtgcaggagtctctagcaaagtccacgcaggtggccctcgaggccctgtcggcgatgcctaccgtacggagctttgccaacgaggagggagaggcccagaagtttaggcagaagttggaagaaatgaagccgctaaacaagaaagaggccttggcttacgtcactgaagtctggaccatgagtgtctcgggaatgctgctgaaggtgggaattctgtacctcggtgggcagctggtggtcagaggggctgtcagcagcggcaacctcgtctcctttgttctctaccagcttcagttcaccagggccgtggaggtcctgctctccatctatccctccatgcagaagtccgtgggcgcttcggagaaaatattcgaatacctggaccggactccctgctctccgctcagtggctcactggcacctttaaacatgaaaggcctcgtcaagttccaagatgtctcctttgcctacccaaaccatcccaacgtccaggtgcttcaggggctgacttttacgctgtatcccgggaaggtgaccgccttggtgggacccaatgggtcagggaagagcaccgtggccgccctgctgcagaacctgtaccagcccaccgggggcaaggtgctcctggatggcgagcccctggtccagtatgatcaccactacctgcacacgcaggtggccgcagtgggacaagagccactgctatttggaagaagttttcgggaaaatattgcctatggcctgacgcggactccaaccatggaggaaatcacagctgtggccatggagtccggagcccacgatttcatctctggattccctcagggctatgacacagaggtaggtgaaactgggaaccagctgtcaggaggtcagcgacaggcggtggccttggctcgagccttgatccggaagccacgcctgcttatcttggacgatgccaccagtgccctggatgctggcaaccagctacgggtccagcggctcctgtatgagagccccgagtgggcctctcggacggttcttctgatcacccagcagctcagcctggcagagcgggcccaccacatcctcttcctcaaagaaggctctgtctgcgagcagggcacccacctgcagctcatggagagaggagggtgttaccggtccatggtggaggctcttgcggctccttcagactgacgggcttctggactgcaagctgcgcgagtccctccccctgctgtcctctgctctgtgtggcggagaacctgggagcaaagattttaccacatccacggagatagttgaggagcgatggtgtttgttacatgaggaaaatgtaacctctaggagatgcccggaatttaccacnaatgttttcccgccccgccccctgttagacgggggatgggggtaggtaccccaggctaacactgagctgctgagtctcctgtctcccgtggagtttgcatcacggcatgcgcccacaaacctggcttatgtggcgttgggacagaatgagaagaaacgctcaaaatgtacagagaaggggcaaatagcttgcaattaaccaaaggcataggctggcctatgggtgttccgcgggttcttgatatttataataaaactggtgttttgtaaaaaaaaaa

SEQ ID NO: 3434 - DNA, 499 bp, Rattus norvegicus
  Genbank Accession No. X58200
ctctttccggacgctcaagatgtcgaagcgaggacgtggtgggtcctccggagcgaaattccggatttccctgggtcttccggtaggagctgtgatcaactgtgctgacaacacaggagccaaaaacctgtatatcatctctgtgaagggaatcaagggacggctgaacagacttcctgctgctggtgtgggcgacatggtgatggccacagttaagaaaggcaaaccagaactaaggaaaaaggtacatcctgcagtggtgattcgacaacgaaagtcatatcgaagaaaagacggggtgttcctttattttgaagataatgcaggggtcatagtaaacaataaaggcgagatgaaaggttctgctatcacaggtccagttgcaaaggagtgtgcagacttgtggcccaggattgcatccaatgcaggaagcattgcctgattctccagtgtgtttgtaaaatatattcattaaagtcttctctctgaaaaaaaaaaa

SEQ ID NO: 3435 - DNA, 318 bp, Rattus norvegicus
  Genbank Accession No. X59051
ctcgttcctttttcctccttgggcgtctgaaggcaagatgggtcaccagcagctctactggagtcacccgcggaagttcggccagggttctcgctcttgccgcgtctgctctaaccgccacggtctgatccgtaaatacgggctgaacatgtgccgacagtgcttccgtcagtacgcgaaggacataggcttcattaagttggactaagcgacctgaatggatgattcgactgtctacccaatgaaaccaactgtctaccctgtgataccaatcatgctagtctttgcgcacacagaataaaaaactgaaggcctcta

SEQ ID NO: 3436 - DNA, 497 bp, Rattus norvegicus
  Genbank Accession No. X59375
aaagttgctgctaggcgctcgaaagcgagcacctcatctcagagatctggagcggccgcgcttgcggagctgtcaccatgcctctggctagagatctattacacccttccttggaagaggaaaagaaaaaacataagaagaaacggctggttcagagcccaaattcttacttcatggatgtgaaatgtccaggttgctacaagattactacagttttcagccatgctcagacagtggttctttgtgtgggttgttcaaccgtgctgtgccagcccacaggagggaaagccaggctcacagaaggctgttcatttagaagaaagcaacactaatcatctatacaagttcctgaattcgtgtttttcacagaaagccttatcaactttagttactctaccaagacaatgtaattattgtttgattttataaagtctacaacaatgatctcctattttggtgtcagtttttcaataaagttttacttatgaacaagttca

SEQ ID NO: 3437 - DNA, 15231 bp, Rattus norvegicus
  Genbank Accession No. X59601
atggtggctggcatgctcatgccactggaccagcttcgggccatctatgaggtgctctttcgtgagggggtgatggttgccaagaaggaccggcgaccccgaagcctgcatccccatgtgcccggcgtcaccaatctacaggtcatgcgtgccatgacctcgctgaaagctcggggcctggtgcgggagacctttgcctggtgccacttctactggtacctgaccaacgagggcatcgaccacctacgccagtacctacacctgccaccggagatcgtacctgcctctctgcagcgtgtgcgccgccctgttgccatggtgatgcctgcacgtcgtcgctccccccatgtgcagaccatgcaaggtcccttaggctgtccaccaaagaggggccctctgccagctgaggaccctgcccgggaggagcggcaggtctatcgcaggaaggagcgtgaggaaggggcacctgaaacccctgtggtgtctgccaccatcgtggggaccctggccaggcccggcccagagcccaccccagccacagatgaacgagaccgtgtgcagaagaaaacttccaccaagtgggtcaataaacaccttatcaaggctcaaaggcacatcagtgacctgtatgaagacctccgtgatggccacaacctcatctccctgctggaagtcctctcaggagacagcctgccccgagagaaggggaggatgcgtttccacaagctgcaaaacgttcagattgccctggactatctccgacatcggcaggtgaagttggtgaacatcagaaatgatgacatcgccgatggcaaccccaagctgaccctgggcctgatctggacaatcatcctgcacttcaagatctcagacattcaggtgagcggccagtccgaggacatgacagccaaggagaagctgctgctgtggtctcagcgtatggtagagggctaccaaggcctgcgctgtgacaacttcaccaccagctggcgcgacggccggctcttcaatgctatcatccacaggcacaagcccatgctcatagacatgaataaagtgtaccgacagaccaacctggagaacctagaccaggccttctccgtggcagagcgggacctgggagttaccaggctcctggacccagaagatgtggatgtccctcagcctgatgagaagtccatcatcacctacgtttcatccctgtatgatgccatgccccgtgtgccgggcgcacaggatggagtgagggccaatgagctgcagcttcgttggcaagagtaccgggagcttgtgctgctgctgctacagtggatccggcaccacaccgctgcttttgaggagcgcaagttcccctccagctttgaggagattgagatcctatggtgccagtttctgaagttcaaggagacagaacttcctgccaaggaggcagacaagaaccggtccaaaggcatctaccagtctttggagggagcagtacaagcaggccagctcaagattccccctggctaccacccgctagacgtggaaaaggagtggggcaagctgcacgtggccatcctggagcgggagaagcaactccggagcgagtttgagaggctggagtgtcttcagcgcattgtgagcaagctacagatggaggctgggctatgtgaggagcagctgtaccaggcggattccctactgcagtcggatattcggctgctggcctcaggcaaggcggcacagcgggctggggaagtggagagagacctggacaaggctgatggtatgatccggctgttgttcaatgatgtgcagacccttaaagatgggcggcatccacagggtgaacagatgtaccggagggtgtatcgtctgcatgagcgcctggtagccatccgcactgaatacaacctccggctgaaggcaggggtgggtgcccctgtgacccaggtgaccctgcagagcacacagaggcgcccagagctagaggactccacactgcgttacctgcacgacctgctggcatgggtggaggagaaccagcgtcgaatagacggtgctgagtggggcgtggacttgcccagtgtagaggcacagctgggcagccaccgaggcatgcatcagtctattgaggaattccgggccaagatcgagcgggctcggaatgatgagagccagctctcccctgccacccgaggtgcctaccgagactgcctgggccgcctggacctgcagtatgcaaagctgctgaactcctccaaggcccgcctccggtccctggagagcttgcatgggtttgtggcggcagctaccaaggagctgatgtggctgaatgagaaggaagaggaagaagtgggctttgattggagtgaccgcaacaccaacatggctgccaagaaagaaagttactcggccctgatgcgtgagctggagatgaaggaaaagaaaattaaggagatccagaacacgggggacaggttgctgcgggaagaccatcctgcccggcccacagtggagtccttccaggctgccctgcagacacagtggagctggatgctgcagctgtgttgctgcattgaagcgcacttgaaagagaacacagcctacttccagttcttctcagatgttcgggaggctgaggaacagttgcagaaactacaggagacgttacgcaggaagtacagctgtgaccgctccatcactgtcacaaggcttgaggacctgctgcaggatgcccaggatgagaaggagcaactgaatgagtacaaagggcacctctcaggcctggccaagcgggccaaggctattgtgcagctgaagccacgcaaccctgcccaccctgtgcggggtcacgtgcccctgctagctgtgtgtgactacaagcaggtggaggtgactgtgcacaagggtgaccaatgccagctggtgggccctgcacagccgttccactggaaggtgctcagtagttccggcagtgaggctgccgtgccttctgtgtgctttcttgtgccgccacccaaccaggaggcccaggaagctgttgctaggctggaggcccagcatcaggccctggttactctgtggcaccagcttcacgtggacatgaagagtcttctggcatggcagagcctcaatcgtgacatacagctcatccggtcctggtccctagtcacgttccgcacgctgaagcccgaggagcagcggcaagctctgcgcaacctggagttgcactaccaggccttccttcgagacagccaggacgctggtggctttgggcccgaggaccggctggtggcagagcgcgaatatggatcttgtagtcgccactaccagcagctgctacaaagcctggagcagggtgagcaggaagagtctcgctgtcagcgatgcatctcggagctcaaggacattcggctgcaactggaggcctgtgagactcggactgtgcaccgtctgcggctgccactggataaagaccccgcacgggagtgtgcccagcgcatcgctgagcaacagaaagcacaggctgaggtggaggggctgggcaagggagttgcccggctgtctgctgaggctgagaaagttctggccttgccagagccgtcacctgctgcaccaactctgcgctcggagttggaattgaccctgggcaagctggaacaggtcagaagcctgtctgccatctacttggagaaactcaagaccatcagcttggtaattcgcagtacccagggggctgaggaggtgcttaaaacacacgaggagcacctgaaggaggcccaggccgtgcctgccacactccaagagctcgaagtcaccaaggcttcactaaagaagctgcgggcccaggcggaggcacagcagcctgtattcaacaccctacgagatgagctgaggggggcacaggaagttggtgaacggctacagcagcggcatggtgagcgggacgtggaagtagagcgctggcgagaacgtgtcactcagttgctggagcgctggcaggctgtgctagcccagactgatgtgcggcagcgggagcttgaacagctgggccgccaacttcgctactaccgtgaaagtgcggatccgctgagctcctggctgcaggatgccaagagccggcaagaacagatccaggctgtgccaatagccaacagtcaggctgcacgagaacagctgcgccaggagaaggccctgctggaggagattgagcgccatggtgagaaggttgaggagtgccagaagtttgctaagcagtacatcaatgcaatcaaggactatgagctccagctgatcacctacaaggctcagcttgaacctgtggcctcccccgccaagaagcccaaggttcagtctggatcggagagcgtcatccaggagtacgtggatctgcgtacacgctacagtgagctgaccacactcacgagtcagtacatcaagttcatcagtgagacactgcgccgcatggaagaggaagagcggctggctgagcaacagcgggcagaggagcgggagcgcctggccgaggtggaggccgcgctggagaagcagcggcagctggctgaggcccatgcccaggccaaggcacaggccgagctggaggcacgagaactgcagcggcgcatgcaggaggaggtgacgcggcgcgaggaggcggcggtggacgcacagcaacagaagcgcagcatccaagaggagctgcagcatctgcggcaaagctcagaggcagagatccaggccaaggcccagcaggtggaggctgcagagcgcagccgcatgcgcattgaggaagagatccgcgtagtccgtctgcagctagagacaactgagcgtcagcgtggaggggcggaggatgagctgcaggctctgcgtgcacgggctgaggaggcagaagcacagaagcggcaggctcaggaggaagccgagcgcttgcggaggcaggtgcaggatgagagccaacgcaaacggcaggcggaggccgagctggccctgcgtgtgaaggcagaagcggaggcagcgcgagagaagcagcgggccctgcaggctctggatgaactgaaactgcaggccgaggaggccgaacggtggctgtgccaagccgaggcagagagggctcgccaagtgcaggtagccctggagacagcgcagcgtagtgcagaagtggagctgcagagcaagcgtccgtcctttgcagagaagaccgcacagttggagcgcacgctgcaggaagagcacgtgacagtgacacagctgcgggaggaggcggaacggcgggcacagcagcaggctgaagccgagcgagcccgtgaggaagccgagcgggagctggagcgctggcagctgaaggccaatgaggcgctgcggctgcggctgcaggcagaggaggtggcacagcagaagagcctggcccaggccgatgcggagaagcagaaggaagaggcagaacgggaagcccggcggcggggcaaggcagaggagcaggccgtgcggcagcgagagctggctgagcaggagctggagaagcagcggcagctgacagagggcaccgcccagcagcgcctggctgccgagcaggagctgattcgcctgcgggcagagacggagcaaggtgagcatcagcggcagctgctggaggaagagctggcccggctacagcacgaagcgacagcagccacacagaagcgccaggagctggaggctgagctggcgaaggttcgggcagagatggaggtactgctggccagcaaggcacgagccgaagaggagtctcgctccaccagtgaaaagtccaagcagaggctggaagctgaggcagggcggtttcgagagctggctgaggaggctgcccgcctgcgtgctctggccgaggaggcaaggcggcaccgggagttggccgaggaggacgcggcacgccagcgggccgaggcggacggagtgcttacggagaagctggctgccatcagtgaggccacaaggctcaagacggaggcagagattgcactcaaagagaaggaggccgagaacgagcgcctgaggcgcctggctgaagatgaggccttccagcggcgccggctggaggagcaggcagcacagcacaaggcagacatagaggagcgcctggcccagctgcgcaaggcatccgagagcgagctggagcgacagaaggggttggtggaggataccctgcggcagcggcggcaggtggaggaggagatcatggctctgaaggcgagcttcgagaaggccgcggctggcaaggcagaactggagctggagcttggccgcatccgcagcaatgccgaggacaccatgcgcagcaaggagctggccgagcaggaggcagcgcggcagcggcagttggcagctgaggaggagcagaggcgccgggaagccgaggagcgggtgcagaggagcctggcagcggaggaggaagccgcacggcagcgcaaggtcgcactggaggaagtcgagcggctcaaggccaaggttgaggaagcgcggcgcctgcgagagcgagctgagcaggagtctgcgaggcagctgcagctggcccaggaggctgcccagaaacggctgcaggcggaggagaaggcgcacgcctttgtggtgcagcagcgagaagaggagctgcagcagactcttcagcaagagcagaacatgctggagcggctgcggagcgaggcagaggcagcgcggcgagctgctgaggaggcggaggaggcccgggagcaggcagaacgtgaggcagcgcagtctaggaagcaagtggaagaggccgagcggctgaagcagtcggcagaggagcaggctcaggcccaggcccaggcgcaggcggctgcagagaaactgcgcaaggaagcggagcaggaggcggcgcgtcgggcccaggcggagcaggctgcgttgaaacagaagcaggcagccgacgcggagatggagaagcacaagaagtttgcagagcagacgctacggcagaaggctcaggtagagcaggagctgaccacgctgaggctgcagctcgaggagaccgaccaccagaagagcatcctggatgaggagctgcagcggctaaaggctgaggtaacagaggcagcccggcagcgtagccaggtagaggaggagctcttctctgtccgcgtgcagatggaggagctgggcaaactcaaggctcgcattgaagctgaaaaccgggcactcatccttcgtgacaaggacaacacacagcgcttcctggaggaggaggccgagaagatgaaacaggtggcagaggaagctgcacggttgagcgtagctgcccaggaggcagcaaggctgcggcagctagccgaggaggacctggcccagcagcgggccctggcggagaagatgctgaaggagaagatgcaggcggtgcaggaagccacaaggctcaaggctgaggctgagctgctgcagcagcagaaggagctggcacaggagcaggcccggcggctgcaggcggacaaggagcaaatggctcagcagttggtagaggagacacagggtttccagcggaccctggaggctgagcggcagcggcagctagaaatgagcgcagaggctgaacgcctcaagttgcgcatggctgagatgagccgggctcaggcccgtgcagaggaggatgcccagcgcttccggaagcaggctgaagagatcggcgaaaagctgcaccgcactgaactcgctacacaggagaaggtgacattggtgcagactctcgagatccagcgacagcagagtgaccaagatgccgagcgtctgagggaggccattgctgagctggagcgtgagaaggagaagctcaagcaggaggcgaagttactgcagctcaagtctgaggagatgcagactgtgcagcaggagcagatactgcaggagacacaggccctgcagaagagctttctctctgagaaggacagcttgctgcaacgcgaacgcttcatcgagcaggagaaggccaagctggagcagcttttccaggacgaggtggcaaaagcaaaacagctgcaggaggagcagcagcggcagcagcagcagatggagcaggaaaagcaggagctggtggccagcatggaggaggcccggaggcggcagcgtgaggcagaggagggtgtgaggcgcaagcaagaggaactgcagcgtctggagcagcagcggcagcagcaggagaaactactggcagaggagaaccagaggctgcgggagcggctgcagcgcctggaggaagagcaccgagctgcgttggcgcactctgaggagatcgccacctcccaggctgctgccacaaaagcactgcccaatggccgcgacgcacttgatggcccctccatggaggccgagcccgagtacacctttgagggattacgtcagaaggtgccagctcagcagctacaggaagcaggcattctgagcatggaggaactgcagcgtttgacacagggtcacaccacggtggctgagctcacgcagcgggaagatgtgcgccactacctgaagggcggcagcagcatcgcaggattgctcctgaagcccaccaatgagaaactgagtgtctacacagccctacagcggcagctgctcagccctggaacagcccttatcttacttgaggcccaggcagcctcgggcttcctgctggaccctgtccggaaccggcggctgacggtcaatgaggctgtgaaggagggtgtggtgggtcccgagctgcaccacaagctgctgtcagctgagcgtgccgtcactggctacaaggacccttacacaggagaacagatctctctcttccaggccatgaagaaggacctcattgtcagggaccatggcatccgcctgctggaagcccagatcgccacaggtggcatcattgaccctgtacacagccaccgtgttcccgtggacgtggcctaccagcgtggctacttcgatgaggagatgaaccgtgtgctggctgacccaagcgatgacaccaagggcttctttgaccccaacactcacgagaacctcacgtacctgcagctgctggagcgctgtgtggaggaccccgagacaggcctgcgcctcctgccactcacagacaaggctgccaagggtggtgagctggtgtacactgacacggaggcccgtgacgtcttcgaaaaggccacagtgtctgcaccattcggcaagttccagggcaagaccgtgaccatctgggagatcatcaactcagagtacttcacagcggagcagcgacgggacctgctccggcagttccgcacgggccgcatcacggtggagaagatcatcaagattgtcatcacggtggtagaggaacacgagcggaagggccagctctgctttgagggcctccgtgcccttgtgcctgctgcagagctgctggacagtggagtcatcagtcatgaagtctaccagcagctgcagcggggtgagcgctctgtgcgggaagtggccgaggcagacgaggtgaggcaggccctgcggggtaccagtgtcattgccggtgtgtggctggaagaagcagggcagaagctgagcatctatgaggccctgaggagagatttgctgcagccagaggtggctgtggccttgctggaggcccaggctggcactgggcacatcattgaccctgccacgagtgccaggctgactgtggatgaggcagtgcgtgctggcctggtgggtcctgagatgcacgagaagctcttgtcagctgagaaggctgtaacaggctatagggatccctactcgggacagagcgtctcgctcttccaggctctgaagaagggtctcatcccccgagaacagggcctgcgcctgctggatgcccagttatccactggtggcattgtagaccccagcaaaagccaccgtgtgcccctggatgttgcctatgcccggggctacctggacaaagagactaacagggccctgacgtcacccagagacgatgccagagtctaccttgaccccagcacccgggagccagtcacctacagccagctccaacagcggtgccggtctgaccagctgactgggttgagcctactgcccctctcagagaaggccgtccgggcccggcaggaagaggtctactctgagctccaggcccgtgagacattggagaaggccaaggtggaggttcctgtgggcggctttaagggcagggcgctgacagtgtgggagctcataagctcggaatacttcactgaggagcagcggcaggagctgctacggcagttccgcacaggcaaggtcactgtagagaaggtcatcaagattcttatcaccattgtggaggaggtggagactcaacggcaggagagactgtccttcagtggcctccgtgcccctgtgccggccagtgagctcctggcctccaagatcctcagcagaactcagtttgagcagctcaaggatggcaagacatcagtcaaagatctgtcagaggtgggctctgtgcggacactgctgcaaggcagcggctgcctggctggcatctatctggaggactcgaaggagaaagtaaccatctatgaggccatgcgccggggcctcctcagagccagcacagccacactcctgctggaggcccaggcggccactggttttctagtggaccctgtgcggaaccaacgtctgtacgtccatgaagctgtcaaggctggagtggtgggcccggagctccatgagaagctgctgtcggctgagaaggcggtcactggttacaaagatccctactctggcagcaccatctcgctgttccaggccatgaagaagggcttggtcctcagggaccatgccatccgcctgctggaggcccagattgccacaggtggcatcattgaccctgtgcacagtcaccgccttcccgtagatgttgcctaccagcgtggctacttcgatgaggagatgaaccgtgtgctggctgacccaagtgatgacaccaagggcttcttcgaccccaacacccacgagaacctcacgtacctgcagctgctggagcgctgcgtggaggaccccgagacaggcctgcgcctcctgccactcagaggggcagagaagacagaggtggtagaaaccacacaggtgtatactgaggaggagactcggagggcgttcgaggagacgcagattgacatcccaggtggtggcagccacggtggctcctccatgtctctatgggaggtgatgcagtcagacatgatcccagaggaccagcgtgcccggctcatggccgactttcaggctggcagagtgaccaaggagcgcatgatcattatcatcatcgaaatcattgagaagacggagatcatccgccagcagaacctcgcctcctatgactacgtacgccgccgcctcaccgccgaagacctgtatgaggcccggatcatctcccttgagacctacaacctcttccgggaaggcaccaagagcctccgtgaggttctggagatggaatctgcctggcgctacctttacggcacaggatcggtggccggtgtctacctgcctggctctaggcagacgctaaccatctaccaggcccttaagaaggggctgctgagtgccgaggtggcccgcttgctgctggaagcacaggcagccacaggctttctgctggacccagtgaaaggcgagaggctgactgtggacgaggccgtgcggaagggtctggtaggccccgagctgcacgatcggctcctctctgccgagcgagctgtaactggctaccgagacccctacaccgaacagcccatctcactcttccaggccatgaagaaggagctgatccctgccgaggaggcactgaggctgctggatgctcagctagccacaggaggcattgtggacccccgcctgggtttccacctccccctggaggtggcttaccaacgaggctacctcaataaggacacgcatgaccagttgtcagagcccagtgaggtgcgcagctatgtggacccctccacggatgagcgtctcagctacacacagctgctcaagcgttgccgccgtgacgacaacagcggccagatgctgctgccgctctctgatgcccgcaagctgaccttccgcggcctgcgcaagcagatcaccgtggaggagctggtacgctctcaggtcatggatgaggccacagcactgcagctgcaagaaggcctgacctccattgaggaggtcactaagaacctgcagaagttccttgagggtaccagctgcattgctggagtctttgttgatgctaccaaggaacggctgtcggtgtaccaggccatgaagaagggcatcatccgtcccgggacagccttcgagctcctggaagcgcaggcagccaccggctacgtcattgaccctatcaaggggctcaagctgactgtggaagaggccgtgcgcatgggtatcgtgggccccgagttcaaggacaagctgctgtctgctgagcgtgccgtcactggctacaaggacccttactctgggaaactcatctctctcttccaggccatgaagaagggcctgatcctgaaggaccatggcatccgcctgctagaggctcagatcgccaccggtggcatcattgaccctgaggagagccaccgcctgcctgtggaagtggcctataagcgtggtctctttgatgaggagatgaacgagatcctgactgacccctcagatgacaccaagggcttcttcgacccaaacaccgaggagaacctcacatacctgcagctgatggagcgctgtatcactgacccccagactggcctgtgtctcctgccgctgaaggaaaagaagcgggagcggaagacgtcctccaagtcctcagtgcgcaagcgccgcgtggtgattgtggaccctgagacgggcaaggagatgtcagtgtatgaggcctaccgcaagggcctcatagaccaccagacatacctggagttgtcagagcaggagtgcgagtgggaagaaatcaccatctcttcctcggacggcgtcgtcaaatctatgatcatcgaccgccgctctggccgccagtatgacattggtgacgccatcaccaagaacctcattgaccgctcagcactggaccagtaccgcgctggcacactttctatcaccgagtttgccgacatgctctcaggcaacgctggtggcttccgctcccgctcctcctctgtgggctcatcttcctcctaccccatcagttctgctgtccctaggacccagctagcctcctggtctgatcctactgaggagactggcccagtggccggcatcctagacacagagactctggagaaggtgtccatcacagaggccatgcaccgcaacctggtagacaacatcactggccagcggttgctggaggcacaggcctgcaccgggggcatcattgaccccagcactggtgagcgcttcccggtcactgaggctgtcaacaagggcctggtggacaagatcatggtagaccgtatcaatctggcccagaaggccttctgtgggtttgaggacccacgcaccaagaccaagatgtcagctgcccaggccctgaagaagggctggctttactacgaggcaggccagcgtttcctcgaggtgcagtacctgacgggtggtctgattgagcctgacacacctggccgtgtgtctcttgatgaagccttgcaacgtggcactgtggatgcccgcacagcccagaagctgcgtgatgtcagtgcctactccaagtacctcacgtgccccaagaccaagctcaagatctcttacaaggacgctctggatcggagcatggtggaggagggcacagggctgaggctgctggaagccgcggcacagtccagcaagggctactacagcccgtacagtgtcagtggctctggctctactgctggttcacgcactggttcacgcaccggctccagggccggctcccgtcgtggcagctttgatgccactggctctggcttctccatgaccttttcttcttcctcctactcttcctcaggctatggccgccgctatgcctcagggccttcagcctctcttgggggccctgagtctgcagtggcctgatcccccagcctgtatcctgccttcccgctctgcatgtcgccaggctccccgtggaggcgctggggtcttttctttcttcttctttttttttttttttttaacatttaaaggtgtcttcctcccaagcggtgcctaaaatctaaccaaaaagaccagaataacacattaatatatatatatatatgcgatgtccagacagcctgtgtcttgggaaacagggctggcccaggcccagtgaccactccactctccttgggcctccctaatcctttctacctgccactcaccacagctaggtgccttggagaatccagagctgggcactcagcccactactcctgtctctcctgggaggattgccatctgggaaaggcccccagacctctaagccaaccccactggatgtctacctgctggtcctagctgctgaggggaactggggacggtcctgtgagcagacagctgttgagtctcttgaggcctctgccctgagccagctgcttctccccagtgtatacctgaatattcagtgggttttgctggcaaaggaaagatcccaggccaaccatctcttccagcctgcccagagaagccccttccccatgggaagataaggcctggtcctggccccagcctcccgcctggctcctgcagctgccattggagctgtgctttgtagctcactaccccatacttattcccttgagacctgagcctctgcttcagccttccagcctcaactccccttgtaagtgccttctgtgtccttgtacccaggccctaaagacccagacccagggcaagagatggacattctggctgggcggggctggagggttctgcagatctgagaattccttctccagaggcccagggtcttcaagcctgtggaacccctctgggtgctgctgcccaccccactcccagggagccctggccagcccagctgtgctaacataagtacttggccagtgacactctcccttccctggccttggtggctcctacccctgcctccaccctctgagtgagctttgcatgttccactaaccttgagctggtgacaggtggagatgccaggcagaacactaacctgaccatgggcgggggccctgcggtgtccgcccctcaataaaagcaattccaaccttaaaaaaaaaaaaaaaa

SEQ ID NO: 3438 - DNA, 471 bp, Rattus norvegicus
  Genbank Accession No. X59677
gctagtgacacgaccactcttgagatcaccaccactcctgatgtgaacaccactgctgatgtcaccaccactcctgatgtgaccaccattgctgatgtcaccaccactgctagtatcaccaccactcctgatgtgaccaccacccctgatgtgaccaccactgctgatgtcaccaccactgctggtatcaccaccactcctgatctgaccaccactacgctatttctacccatcctggcctccatggcacaagccatctgtcttcacccgctctacgtcatgctcccctgcaccctggctgcctccctggctttcatgctacctgtggccactccacccaacgccattgtattctcctttggaggcctcaaggtgtctgatatggcccgcgctggattcctgctcaatatcatcggagtgctggctatcacattatccatcaacagctggagtatccccatcttcaagctg

SEQ ID NO: 3439 - DNA, 631 bp, Rattus norvegicus
  Genbank Accession No. X60212
ctgttagcggccagaggtgacctgtgaagatggttcgctactcccttgacccagaaaaccccacgaaatcatgcaagtcaagaggctcaaaccttcgtgttcactttaagaacacccgggaaactgcccaggccatcaagggtatgcatatccgcaaagccaccaagtatctgaaggatgtcactttaaagaagcagtgtgtgccattccggcggtataacggtggagttggtaggtgcgcccaggccaaacagtggggctggacacagggacggtggccaaaaaagagtgctgaatttttgctgcacatgcttaaaaatgcagagagtaatgctgaacttaagggtttggatgtagactctctggtcattgaacacatccaggtgaacaaggctcctaagatgcgcagacggacctacagagctcacggccggattaacccatacatgagctccccctgccacatcgaaatgatcctcactgagaaggaacagattgttccaaagccagaagaggaggttgcacagaagaaaaagatatcccagaagaaattgaagaaacaaaagctcatggcacgggaataaattcagcataaataaatgcggataaagtaaaaaaaaaaaaaaaaaaa

SEQ ID NO: 3440 - DNA, 673 bp, Rattus norvegicus
  Genbank Accession No. X60328
atccagcagttcaagaagtctggcttcagaggccctctaaactggtatcgaaacacagaaagaaactggaagtggagctgtaaggcgttgggaaggaagatcttggtccctgccctgatggtcacagctgagaaggacattgtactccgtcctgaaatgtccaagaacatggaaaactggatccctttcctgaaaaggggacacatcgaagactgtggtcactggacacagatagagaaaccggcagaggtgaaccagattctcatcaagtggctgaagactgaaatccagaacccatcggtgacctccaagatttagccagtggcgtgtcctctgctgggacacattttcatttctgacgtggccttatccacagccagcagcatcgttcttttgccagcagtgattttctttaaatgaaaatgatcagatgtgatgtaattttagatcaggaagaaagtggtgtgtctgattcttttgaggatgactgtatcagtaaaggagagatcacaccccaatagggaggcatggggcagcccagtttgtacctttgtagccaaacccaagcctgctctttctgaagcagctgatcagagagtagggaccttcattcaataaagctaaggccttggtgctcaaaaaaaaaaaaaaaaaaaaaaaaaaaaaaaaaaaa

SEQ ID NO: 3441 - DNA, 1194 bp, Rattus norvegicus
  Genbank Accession No. X60769
ttcgccgcgcccgcgcccgcgcaccacgacttcctttccgacctcttcgccgacgactacggcgccaagccgagcaagaagccgtccgactacggttacgtgagcctcggccgcgcgggcgccaaggccgcaccgcccgcctgcttcccgccgccgcctcccgccgcactcaaggccgagccgggcttcgaacccgcggactgcaagcgcgcggacgacgcgcccgccatggcggccggcttcccgttcgccctgcgcgcctacctgggctaccaggcgacgccgagcggcagcagcggcagcctgtccacgtcgtcgtcgtccagcccgcccgggacgccgagccccgccgacgccaaggccgcgcccgccgcctgcttcgcggggccgccggccgcgcccgccaaggccaaggccaagaaggcggtggacaagctgagcgacgagtacaagatgcggcgcgagcgcaacaacatcgcggtgcgcaagagccgcgacaaggccaagatgcgcaacctggagacgcagcacaaggtgctggagctgacggcggagaacgagcggctgcagaagaaggtggagcagctgtcgcgagagctcagcacgctgcggaacttgttcaagcagctgcccgagccgctgctggcctcggcgggtcactgctagcccggcgggggtggcgtgggggcgccgcggccaccctgggcaccgtgcgccctgccccgcgcgctccgtccccgcgcgcgcccggggcaccgtgcgtgcaccgcgcgcacctgcacctgcaccgaggggacaccgtgggcaccgcgcgcacgcacctgcaccgcgcaccgggtttcgggacttgatgcaatccggatcaaacgtggctgagcgcgtgtggacacgggactgacgcaacacacgtgtaactgtcagccgggccctgagtaatcacttaaagatgttcctgcggggttgttgctgttgatgtttttgtttttgttttttgttttttgttttttttttggtcttattatttttttgtattatataaaaaagttctatttctatgagaaaagaggcgtatgtatattttgagaaccttttccgtttcgagcattaaagtgaagacattttaataaacttttttggagaatgtttaaaaaaaaaaaaaaaaaaaaaaaaaaaaaaaaaaaaaaaaaaaaaaaa

SEQ ID NO: 3442 - DNA, 2208 bp, Rattus norvegicus
  Genbank Accession No. X60790
agaaccttttctacccagtgacactggacgtgctgcaccagatcttctcgaagtttggcacagtcctgaagatcatcacgttcaccaagaacaaccagttccaggcgctgctgcagtatgctgaccctgtgagcgcccagcatgccaagctgtccctggatggccagaacatctacaatgcctgctgcacgctgcgcatcgacttctccaagctcaccagtctcaacgtcaaatacaacaacgacaagagccgagactacacacgccctgacctgccctctggagacagccagccatcactggatcagaccatggcagcagcctttggtgcgcccggcataatgtcagcctctccgtatgcaggagcggttccctcccacctttgccatccctcacgcgcaggcctctctgttcctaatgtccatggagccctggcacccctggccataccctctgctgctgctgctgctgctgcagccggccgcattgccatcccagggctggcaggcgccgggaattccgtccttttggtcagcaacttgaaccctgagagagtcacaccccaaagcctctttattctcttcggcgtctacggtgatgtgcagcgggtgaagatcctgttcaacaagaaggagaacgcacttgtcgagatggcagacggcagccaggcccagctggccatgagccacctgaacgggcacaagctgcatgggaagtcagtgcgcatcaccctgtcaaagcaccagagtgtgcagctgcctcgtgagggacaggaggaccagggcctgaccaaggactatggcagctcaccgctgcaccgcttcaagaaacctggctccaagaactttcagaacatctttcctccctcagctaccctgcacctctccaacatcccgccctctgtgtcagaggatgacctcaagagcctcttctccagcaatggcggtgtggtcaaaggcttcaagttcttccagaaggaccgcaagatggcactgatccagatgggctctgtggaggaggcagtgcaggcactaattgagctgcacaaccatgacctgggcgagaaccaccacctgcgagtgtccttttccaagtccaccatctaggtgcctgtgggcctgcgaagcttccgccattccagaaaagccactttaaaaagcagctgaagtgaccttacagaccagagatttatttttttaaagagagatcagtttacctgtttttaaaaaaattaaatctagcccactttgccgtggcaggaaatggcttgggccacagaggcccaggcccagcaaccatgccttgaggggcttaggcgtgaggccacagcggtgccccaacacagccgcttctgtgccttacaaaaccagcgtgcctcacggccgcacacccaccctctaaggccaccagttgtctctagacctgcagtgagccaggcggcctatacttaggctccccaatgccgtgtaagagctggggccactcccctacacccattataatcaagtgacatgattctcccatgtccctggccagcccagagggcccaggccgtcctcagcgccgagccttgtgtgaccttgtattctattccgtggggtcacagacacctgtgcctagcaatctttccacttgaccaaatacccgagtcttttccatttatatgcaagagatagagtttttaagtaactttttatagcagtggtacaattgtatgtgtgtactctaagcttctctgtcccctgcactccttccttccagtgaccaacttgcaggtgggcccaggccagggctggagaagaagctctgaggcttgtgggtgtcctaccttcaaattttggaccaaagttttgttctctgcccgcctctgactatgcccagttgaggggctgacctctaggccttaatgtccttcctggacgcccacctccatcctagcctgtttctatgggaggggttccctgcacctcagtttctgtgaaagtcatggaagagtgtaaatatttatgattttatacctgtggggctgaggcggtgcagcattttttatggtgacagatgtatattttggtaacgactacaggctcagtattgtcctgggccagccctagccacatctaccccagcccagatggtgtattggggggagggggactttccattaaagcagtttataacctttgaaaaaaaaaaaaaaaaaaaaaaaaa

SEQ ID NO: 3443 - DNA, 498 bp, Rattus norvegicus
  Genbank Accession No. X61381
tgtgtgcgatcgcggtggatcgctaccatgaaccacacttctcaagccttcgtgaacgctgccactgggggacaacccccaaactacgaaagaatcaaggaagaatatgaggtgtctgaactgggggctccccacggatcggcttctgtcagaactaccgtgatcaacatgcccagagaggtctctgtgcctgaccatgtggtctggtccctgttcaatacgctcttcatgaacttctgctgcctgggcttcattgcctatgcctactctgtgaagtctagggatcggaagatggtgggtgatatgactggagcccaggcctacgcatccactgccaaatgcctgaacatcagctccctggtcctcagcatcctcatggtcattatcactattgttactgtcgtcatcattgctcttaatgctcctcgtctccagacttgatagaggattctggtttctgatcctgacgtgcttcacgctctgctggctgcccttttt

SEQ ID NO: 3444 - DNA, 2153 bp, Rattus norvegicus
  Genbank Accession No. X62322
agggagcgcggaccccgacgcaggcagaccatgtggatcctggtgagctggctggccttagtggcaaggctggtggctggaacacagtgcccagatggtcaattctgccctgttgcctgctgccttgaccagggaggagccaactacagctgctgtaaccctcttctggacacatggcctataataacgagccgtcgtctagatggctcctgccagatccgtgaccactgtcctgatggctactcttgtcttctcactgtgtctgggacttccagctgctgcccgttctctgagggtgtatcttgtgatgatggccagcactgctgcccccggggcttccactgtagtgcggatgggaaatcctgctctcagatatcagatagcctcttgggtgctgtccagtgtcctggtagccagttcgaatgtcctgactccgccacctgctgtattatgattgatggttcctgggggtgctgccccatgccccaggcctcttgctgtgaagacagagtgcattgctgtccccacggggcctcctgtgacctggttcacacgcgatgcatttcacccacgggcacccaccccttactaaagaaattccccgcacaaaggaccaacagggcagtggctttccctttttccgtggtgtgccctgatgctaagacccagtgccctgatgactctacctgctgtgagctacccactgggaagtatggctgttgtccaatgcccaacgccatctgctgttccgaccacctgcactgctgcccccaggacactgtatgtgacctgatccagagcaagtgcatatccaaggactacaccacagatctcatgaccaagctgcctggatacccagtgaatgaggtgaagtgcgacttggaggtgagctgtcctgatggctacacctgctgccgcctcaacactggggcctggggctgctgtccattcaccaaggctgtgtgttgtgaagaccacattcactgctgcccagccgggtttcagtgtcacacagagacaggaacctgtgaactgggagtccttcaggtaccctggatgaaaaaggtcacggcctccctcagcctgccagacccacagatcttgaagaatgatgtcccctgtgatgacttcagtagctgtccttctaacaatacctgctgcagactcagttctggggactggggctgctgtcccatcccagaggctgtctgctgcttagaccaccagcattgctgccctcagggtttcaaatgtatggatgaggggtactgtcagaagggagacagaatggtggctggcctggagaagatgcctgtccgccagacaactctgctccaacatggagatattggttgtgaccagcataccagctgcccagtagggcaaacatgctgcccaagcctgaagggaagttgggcctgctgccagttgccccatgctgtgtgctgtgaggaccggcagcactgttgcccggctgggtacacctgcaacgtgaaggcgagaacctgtgagaaggatgcaggctctgtccagccttccatggacctgacctttggctctaaggttgggaatgtggaatgtggtgccggacatttctgccatgataaccagtcctgttgtaaagacagccaaggaggctgggcctgctgtccctatgtaaagggtgtctgctgtagagatggacgtcactgttgtcccattggcttccactgttcagccaagggaaccaagtgtttgcggaagaagacccctcgctgggacatacttttgagggatccagccccaagaccgctactgtgaggaagggctaacgactaaagaactccacagtcctgggaaccctgttctgagggtatccaccactcaggcctccctggcacctcttcctttagtctccccggcctactcattctgagtcaccccatcaccatggaaggtggggcctcaaactaagaccttctcttatggaaagaaggctgtggcaaaagccccgtatcaaactgccatttcttctgatttctgtggaccttgtggccaggtgctcttctcgatccacaggtgttgtgtgagcttgcttttgtgtgtgtgtgtgtgcgcgcgtgcgagcgtgttgctccaataaagtttgtacactttcaaaaaaaaaaaaaaaa

SEQ ID NO: 3445 - DNA, 466 bp, Rattus norvegicus
  Genbank Accession No. X62482
tgtggctgcagtggtccacactactctctgagtttcgccatgccgcccaaagacgacaagaagaagaaggatgccggaaagtcggccaaaaaagacaaggacccagtaaataaatctggtggcaaggccaaaaagaagaagtggtccaaaggcaaagttcgggacaagctgaacaatctcgtcctgtttgacaaagctacttacgacaaactttgtaaggaagttcccaactataagcttattactccagctgtggtctccgagagactgaagattcgaggttccttggccagggcagcccttcaggagctacttagtaaaggacttatcaagctggtttcaaagcacagagcccaagtaatttacaccagaaacacaaagggtggagatgccccagctgctggtgaagatgcataaacagattgaatcagctgtacatttgggaaaataaaactttattgaatca

SEQ ID NO: 3446 - DNA, 466 bp, Rattus norvegicus
  Genbank Accession No. X62950
aggaaagacagaatcctactagaggccagaaagaatgttccagacatgggtggaaggccctcactcccgactgacttcaatacgcctgaaggtagggagtgctccatgtctgcccccaggctccaagggtgggtctcctagggcctggaaaatgccccaccaatctggctaagataaggaaagggtatgaagagaaagttacagaaatttgaagggttaagctaagttgctgagagttagtataagttacagagaaagtaaggttaaacaaagagaaagagaaaagaaggtaaaaagagcaggaagctagggaagaaaagagactaaaagaagaggaagctagagagctaaagagagataaaagacaagagaggaacatatactggccacagtagttagggaacctaggaagacagtacctggcaacagaagagaattcctggctaaagatcagtgtgcctaatgc

SEQ ID NO: 3447 - DNA, 1456 bp, Rattus norvegicus
  Genbank Accession No. X63446
gtccatctcccagggcctctctggagcagccatgaagtccctggtcctgctcctttgttttgctcagctctggagctgccaatcagctccacaaggtgcagggctgggttttcgagaattggcttgtgatgacccggaaacagagcatgtagctttgatagccgtggactacctcaataaacatcttcttcagggattcaggcagatcttgaatcagattgacaaagtcaaggtgtggtctcggcggcccttcggagaggtgtatgagttggaaattgacacgctggagacaacctgccacgctctggacccaacccccttagcaaattgttctgtgaggcaacaggccgagcatgcggtggagggagactgtgacttccacatcctgaaacaagatggccagttcagggtgctacacgcccagtgtcattccacaccagactctgcagaggacgttcggaagttttgcccacgatgcccaatcctgatccggttcaatgacaccaacgtggtccacactgtcaaaactgccctggctgccttcaatgcacagaataatggaacctattttaaactggtggagatttcccgagctcaaaatgtgcctttcccggtgtctactctcgtggagtttgtgatagctgcgactgactgtactggtcaggaggtcacagatccagccaaatgcaacctgctggcagaaaagcaatatggcttctgcaaggcgactctcatccacagacttggtggggaagaggtttcagtggcctgcaagttattccagacacagccccagccagccaatgccaaccctgcaggtcctgcacccacagtgggccaagctgcgcctgtagccccaccagctggcccacctgaatccgtggtggtaggacccgtggcagttcctctaggacttccagaccaccgaacccaccatgacctacggcatgccttctctcctgtggcttctgtggagtcggcctcaggagaagttcttcactcacctaaggtgggccagcctggtgacgctggtgctgctggcccagtggcccccctgtgcccagggagagtcagatacttcaagatctaggcttgactcagggaagtaaggttttggcaggcaggacatagccaccactgaagtagagggcttgtccactgaccaagcaagtaccacatcatagcttgaattcaggtctcttcattccccagagaaaaggggcagagaggtgatggttaaatttgttgaaagccagcagcagcaacactagcacttgtggggtgacagactactgtcatttgtttctttgccttctcactgacctcatacaaagcagttgcaagcgcgactgtgaaaggtgctctcaccaaacttcaatctacccataaataaaagtacccgaaggagctttcttaaacaagaaggttctgagccgagtgtggttgtgaaaaaaaa

SEQ ID NO: 3448 - DNA, 1342 bp, Rattus norvegicus
  Genbank Accession No. X63658
gcagccagacgccaggctggatgaaatgaagaaggcaatggcaggcagtggtgccagcctctgaggtgtcgagctgctacctcccaccgctcatctctcacacaatgccatcaaacccctgcaagccacacttcttgccagccacctggcacccgaatctcagggcctcctgcatgctgtttcccttggagaggctgaagagacagagtctagcaggaatcccctccgcttgcgggtaggaagcttggggagcagcctcatggaagagaagcagatcctgtgcgtggggctggtggtgctggacatcatcaatgtggtggacaaatacccagaggaagacacggatcgcaggtgcctatcccagagatggcagcgtggaggcaacgcgtccaactcctgcactgtgctttccttgctcggagcccgctgtgccttcatgggctcgctggcccatggccatgttgccgacttcctggtggccgacttcaggcggaggggtgtggatgtgtctcaagtggcctggcagagccagggagataccccttgctcctgctgcatcgtcaacaactccaatggctcccgtaccattattctctacgacacgaacctgccagatgtgtctgctaaggactttgagaaggtcgatctgacccggttcaagtggatccacattgagggccggaatgcatcggaacaggtaaagatgctacagcggatagaacagtacaatgccacgcagcctctgcagcagaaggtccgggtgtccgtggagatagagaagccccgagaggaactcttccagctgttcggctatggagaggtggtgtttgtcagcaaagatgtggccaagcacctggggttccggtcagcaggggaggccctgaagggcttgtacagtcgtgtgaagaaaggggctacgctcatctgtgcctgggctgaggagggagccgatgccctgggccccgacggccagctgctccactcagatgccttcccaccaccccgagtagtagacactctcggggctggagacaccttcaatgcctctgtcatcttcagcctctccaagggaaacagcatgcaggaggccctgagattcgggtgccaggtggctggcaagaagtgtggcttgcaggggtttgatggcattgtgtgagagatgagcggtgggaggtagcagctcgacacctcagaggctggcaccactgcctgccattgccttcttcatttcatccagcctggcgtctggctgcccagttccctgggccagtgtaggctgtggaacgggtctttctgtctcttctctgcagacacctggagcaaataaatcttcccctgagcc

SEQ ID NO: 3449 - DNA, 1607 bp, Rattus norvegicus
  Genbank Accession No. X64401
ggatgcagagcatcagaggcccagctagagggacaacacagaggagtaatttgctgacagacctgcagggatggacctgctttcagctctcacactggaaacctgggtcctcctggcagtcgtcctggtgctcctctacggatttgggacccgcacacatggacttttcaagaaacaggggattcctgggcccaaacctctgcctttttttggcactgtgctgaattactatatgggtttatggaaattcgatgtggagtgccataaaaagtatggaaaaatatgggggttgtttgatggtcaaatgcctctgtttgccatcacggacacagaaatgatcaagaatgtgctagtgaaggaatgcttttctgtcttcacaaaccggcgggattttggcccagtggggattatggggaaagctgtctctgtagctaaggatgaggagtggaagagatatagagccttgctgtcccccacgttcaccagtggaagactcaaggagatgttccccatcattgaacagtatggagacattttggtaaagtacttgaagcaagaggcggagacaggcaagcctgtcaccatgaaaaaagtgtttggtgcctacagcatggatgtgatcaccagcacatcatttggagtgaacgtcgattcccttaacaacccaaaggatccttttgtggagaaagccaagaagctcttaagaattgatttttttgatccgttgttcttgtcagtagtactctttccattcctcacgccagtatatgagatgttaaacatctgcatgttcccaaaagattcaatagaatttttcaaaaaatttgtgtacagaatgaaggaaacccgcctggattctgtgcagaagcatcgagtggattttcttcagctgatgatgaatgctcataatgattctaaagacaaagaatctcatacagccctatccgatatggagatcacagcccagtcaatcatttttatttttgctggatatgaacccaccagcagcacactttcctttgtcctgcattccctggccactcacccagatacacagaagaaactgcaggaggagatcgacagggctctgcccaataaggcacctcccacctatgatactgtgatggaaatggaatacctggatatggtgttgaatgaaaccctcagattgtatccaattggtaatagacttgagagagtctgtaaaaaagatgttgaaatcaatggtgtgtttatgcccaaagggtcagtggtcatgattccatcttatgctcttcaccgtgatccacagcactggccagagcctgaggaatttcgcccagaaaggttcagcaaggagaacaagggcagcattgatccttatgtatatctgccctttggaaatggacccaggaactgcattggcatgaggtttgctctcatgaatatgaaactcgctctcactaaagttctgcaaaacttctccttccagccttgtaaggaaacacagatacctctgaaattaagcagacaaggacttcttcaaccaacaaaacccattattctaaaggttgtgccacgggatgaaatcataactggatcatgattttccctcaaggagttctgct

SEQ ID NO: 3450 - DNA, 2354 bp, Rattus norvegicus
  Genbank Accession No. X64589
gaattccaatcagttaaccgaaacaaaagctcatggactaaatgctaacagttggagagcgacactgtatttttgttgttgctttttgcccacgacagcgacagagctgatagcatactgcatgagaattggaaggaaggtctcaaagctttattctaaagtaattccgaggtgtgggcagccagaggttagggtgtcttctcagatcggcgaacctctgcttcaggaggagccatggcgctcagggtcactaggaacacgaaaattaacacagaaaataaggccaaggtcagcatggcaggcgccaagcgtgtgcctgtggcagttgctgcctccaaacccctgctgagatcgagaactgctcttggagacattggtaataaagtcagcgaacagtcaagaatacccctcaaaaaggaaacaaaaaagttaggttctggaacagttactgttaaagccctaccaaaacctgtggacaaggtgccagtgtgcgaaccagaggtggaactggatgagcctgagcctgaacctgttatggaagtgaaacactctcctgagcctattttggttgatactccctctccaagcccaatggaaacatctggatgtgcacctgccgaagaatatctgtgtcaggctttctccgatgtgattcttgcagtgagtgatgtagatgcagacgatggtggtgatccaaacctctgtagtgaatatgtgaaagatatctatgcttacctcagacaactggaggaagagcagtcagttagaccaaaatacctactgggtcgtgaagtcactggaaacatgagagccatcctaatcgactggctaatacaggttcagatgaaatttcggctgctgcaggagaccatgtacatgactgtgtccattatcgatcggttcatgcaggacagttgtgtgcccaagaagatgctgcagctggttggtgtaactgccatgtttattgcaagcaaatacgaggagatgtaccctccagagatcggtgacttcgcttttgtgactaacaacacttacaccaagcaccagatcagacagatggagatgaagattctgagagttctgaacttcagtctgggtcgccctctgcctctgcacttcctccgtagagcatctaaaattggagaggtcgatgttgagcagcatactttggccaaatacctcatggagctctccatgctggactacgacatggtgcattttgccccttctcaaattgcagctggggctttttgcttagccctgaaaattcttgacaacggtgaatggacaccaactctgcagcactacctgtcccacacggaagaatctctgcttcctgtgatgcagcacctggctaagaacatagtcatggtgaaccgtggcctcacaaagcacatgacgatcaagaacaagtatgcaacatctaagcatgctaagatcagcactctggcacagctgaattgtacactagttcagaatttgtctaaggccgtgacaaaggcgtaactcgaatggactacctcgtctgcagatgcagttggcaccatgtgcgcctgtacataggataccatgtttatttgctcttcaataaaggttgtgacttttttactttgcatagctcaactcatttgaatgtggttgcttctgactttaggataacagaagttgtcaaagaatttaggagtatatcaaaaactgcttctagtttaacagtggattcagttaatgtatatatgtgtagcctatattttatatacttgcttcactttgtgtgtccttatcatgtagtcatctgcctagctctgggttaaactccaagtctaccagctagtcctgctgcctgaaaccactgtctcttgagctgtcaactttcagatcttgaaacgaagtgtttttgttatgtaattatttatttgttcttaattggaaggtaggatgttcaaaattaaaggtgtcttaaaataatttgcccccaagtctcagtaccaacagataagggtgtattcttgtatatcctgtatagatataatcatgcatttattgtcgaggagatgtttttatatgggttcatttatcaacagtattccttttagcatccttcaaggcctatattgcatttcctagtgtgaataaacgatgtaatatagtcaatcgttcccttagtgatattcaagtgcattctctcactgcctctccacaatgctgcttaacgctgtttaataccttgcctggctccatgcatagtagctctcccagggggtgtgctttcaattctgacagccagatgagtgcggctggcaccatgccaagatgccacttctttctcctgttttgtaacaccaactggaaaaaaa

SEQ ID NO: 3451 - DNA, 1992 bp, Rattus norvegicus
  Genbank Accession No. X65083
cttcttgtctttgtcagcttggcgctgcagcccgggccatcatggcgctgcgtgtggccgcgttcgaccttgacggagtgctggccctcccctctatagccggggttctgcgccacaccgaggaggccctggcgctgcccagagacttcctacttggcgctttccagatgaaattcccagagggacccactgagcaactcatgaaaggaaagatcacattttcccagtgggtaccactcatggatgaaagctgcaggaagtcctccaaagcctgtggagccagtctacctgagaatttctccataagtgaaatattcagccaagccatggcagcaagaagcatcaaccgccccatgcttcaggcagctgctgctctcaaaaagaaaggattcacaacgtgcattgtcaccaacaactggctggacgacagtgacaagagagacatcctggcccagatgatgtgtgagctgagccaacactttgacttcctcatagagtcctgtcaggtcgggatgatcaagcctgagcctcagatctacaagtttgtactggacaccctgaaggcaaaacccaatgaggttgttttcctagatgactttggaagtaatctgaagccagcccgtgacatggggatggttaccatcctggtccgcgacacagcctcggctttgagagaactggagaaagtcacagggacacagtttcctgaggcacctctgccagtcccgtgcagtccaaatgatgtcagccatgggtatgtgacagtgaagccagggatccgtctgcactttgtggagatgggctctggccctgctatatgcctctgtcatgggtttcctgagagctggttttcttggaggtaccagatccctgctctggcccaggcgggctttcgtgttctagctatagacatgaaaggctatggagactcatcttctcctccagaaatagaagaatatgctatggaattgctgtgtgaggagatggtgacattcctgaataaactgggaatccctcaagcagtgttcattggccatgactgggctggtgtgctggtgtggaatatggctctcttccaccctgagagagtgagggctgtggccagtttgaacactccattaatgccaccaaatcctgaggtgtcccccatggaagttatcagatcgatcccagttttcaactatcagctgtactttcaagagccaggagtggctgaggctgaactggaaaagaacatgagtcggactttcaaaagcttcttccgaaccagtgatgatatgggtctcctcactgtgaataaagccactgaaatggggggaatccttgtgggaactccagaagatcccaaggtcagcaaaattactactgaggaggaaatagagtattacatacagcagttcaagaagtctggcttcagaggccctctaaactggtatcgaaacacagaaagaaactggaagtggagctgtaaggcgttgggaaggaagatcttggtccctgccctgatggtcacagctgagaaggacattgtactccgtcctgaaatgtccaagaacatggaaaactggatccctttcctgaaaaggggacacatcgaagactgtggtcactggacacagatagagaaaccggcagaggtgaaccagattctcatcaagtggctgaagactgaaatccagaacccatcggtgacctccaagatttagccagtggcgtgtcctctgctggggacacattttcatttctggacgtggccttatccacagccagcagcatcgttcttttgccagcagtgattttctttaaatgaaaatgatcagatgtgatgtaattttagatcaggaagaaagtggtgtgtctgattcttttgaggatgactgtatcaccaaaggagagatcacaccccaatagggaggcatggggcagcccagtttgtacctttgtagccaaacccaagcctgctctttctgaagcagctgatcagagagtagg

SEQ ID NO: 3452 - DNA, 1227 bp, Rattus norvegicus
  Genbank Accession No. X65948
cgcggccgccttgaagatggcgtcgaccagccgtttggatgctctcccacgagtcacatgtcccaatcatccagatgcgattttagttgaggactacagagctggcgacatgatctgtcccgaatgcggcctagttgtaggggaccgggttattgatgtggggtctgaatggagaactttcagcaatgacaaagcaacgaaagacccatctcgagttggagactctcagaatcctcttctgagtgatggagatttgtccaccatgattggcaagggtacaggagcggcaagttttgatgaatttggcaattctaagtatcagaaccggagaacaatgagcagctctgatagagctatgatgaacgcattcaaggagatcacgaccatggcagacagaatcaacctcccacgcaatatagttgatcgaacaaataatttattcaagcaagtatatgagcagaagagcctgaagggaagagctaatgatgcgatagcttctgcttgtctgtacatcgcttgtagacaagaaggcgttcccaggacatttaaagaaatatgtgctgtgtctcgaatctctaagaaagaaattggccgttgttttaaactgattttgaaagctttggagacgagcgtggatctgatcacaactggggacttcatgtccaggttctgctccaacctttgcctccccaagcaagtgcagatggcagctacacacatagcccgcaaggctgtggagctggacttggttcctggcaggagtcctatctctgtggcggcagcagctatttacatggcctcccaggcttcagctgagaagcgaacacagaaagaaatcggggatattgctggtgttgctgatgttacaatccgacagtcctacagactgatctaccctcgggctccagatctcttcccttcagacttcaagtttgacaccccagtggacaaattaccccagctataagctgaggcaactaagtgtcacactcttaatgtacatggaactttgtgcatagccacacagtgctggttgagcctttaatgaggaaaaaggagatggtacgcattccacagctaagtattattgcttagtcttctgtatgtatatagtagtgcgacatatttaatgacttaaatttcttactgattctgctttcttttttagtgatctaggaaacagtattttggaagatattaaaatatgtaattctcaaataaaatttt

SEQ ID NO: 3453 - DNA, 366 bp, Rattus norvegicus
  Genbank Accession No. X66369
ttccggtctctttggcctcgccggtagaagcaagatgacgaaaggaacgtcatcctttggaaagcgtcgcaataagacgcacacgctgtgccgccgctgtggctccaaggcctaccaccttcagaagtcgacctgtggcaaatgtggctaccctgccaagcgcaagagaaagtataactggagtgccaaggctaagaggcgaaacactaccgggactggtcggatgaggcacctaaagatcgtctaccgaagattcagacatggattccgtgaaggaacaacacctaaacccaagagggcagctgttgcagcatccagttcatcttgaggatttcaatcggtcataaaataaatcttctggtttca

SEQ ID NO: 3454 - DNA, 3091 bp, Rattus norvegicus
  Genbank Accession No. X66870
gccaacccagatcccgaggtgcgccacgcccagcccagatctccacgcctgccaggagcgagcttcgccggctcgctgtcccccgagcagcctctgtccttctgtccgagtcccgcgcccttctcgggacccctgcccagcggcagcactgccaccctgccggccatggagaccccgtctcagcggcggcccacccgcagtggggcgcaggccagctctacccctggtcgcccactcggatcacacggctgcaggagaaggaggacctgcaggagctcaatgaccgtctggccgtgtacatcgatcgcgtgcgctccctggagacggagaacgcggggctgcgccttcgcatcactgagtctgaagaggtggtcagccgagaggtgtccggcatcaaggcggcctacgagcgagctgggggatgcccgcaagaccctcgactctgtggccaaggagcgcgcccgcctccagttggagctgagcaaagtgcgtgaggagttcaaggagctgaaggcgcgcaataccaagaaggagggggatttgttggctgcgcaggcccggctcaaggacctggaggctcttctcaactccaaggaggctgccctgagcactgctctcagtgagaaacgcacgttggaaggcgagctccatgatctgcgggggcaggtagccaagcttgaggcagccctgggtgaggctaagaagcaactccaggatgagatgctgaggcgagtggatgctgagaacaggctacagaccctgaaggaggagctggatttccagaagaacatttacagtgaggaactgcgtgagaccaagcgccggcacgagacccggctggtggagattgataatgggaagcagcgagagtttgagagccggctggcagatgctctgcaggagctgcgggcccagcatgaggaccaggtggagcagtacaagaaggagctagaaaagacatactctgccaagctggataatgcccggcagtctgccgagaggaacagcaacctcgtgggagctgcccatgaggagctccagcagtctcgaatccgcattgacagcctctcagcccagctcagccagctccagaagcagttggcagccaaggaggccaagctgcgtgacctggaggactccctggcccgtgagcgggataccagccggcgcctgctggctgaaaaagagcgggagatggctgagatgcgggcaaggatgcagcagcagctggatgagtaccaggaattgctggacatcaagctggccctggacatggagatccatgcctaccgaaagctgctggagggcgaggaggagaggctacgcctgtcccccagccctacctcgcagcgcagccgtggccgcgcctcctcccactcctcccagtctcagggtggaggcagcgtcaccaaaaagcgcaagctggagtcttctgagagccggagcagcttctcgcagcatgctcgcactagcggccgtgtggccgtagaggaagtagatgaagagggcaagttcgtgcggctgcgcaacaagtccaacgaggaccagtccatgggcaactggcagatcaggcgtcagaatggtgatgatcctttgatgacttatcgcttcccaccgaagttcaccctaaaggccgggcaggtggtgacgatctgggcttcaggagctggggccacccatagcccccctactgacttggtgtggaaggcacagaacacttggggctgtgggagcagccttcgcacggctctcatcaacgccactggagaagaagtggccatgcgcaagctggtgcgctcactgaccatggttgaggacaatgacgatgaggaagaggatggagatgagctgctccatcaccaccgtggctcccactgcagcagctcgggggaccccgctgagtacaacctgccgtcagcaccgtgctgtgcgggacatgtgggcagcctgctgacaaggctgccagtggctcaggaccgcaggtgggcggatccatctcctctggctcttctgcctccagtgtcacagtcactcgaagcttccgcagtgtggggggcagtgggggtggcagcttcggggacaacctagtcacccgctcctacctcctgggcaactccagtccccggacccagagctcccagaactgcagcatcatgtaatctgggacctgccaggcgagggtgggggcagaggccacctgctccctcttcaccacatgccacctcctgccctgttccttatgagagcaggtctgaagccaaagaaaactatcccctgcctttgggtgtttttcttttttccttctattttttttctaagagaagttattttctacagtggttttatactgaaggaaaaacacaagcaaaaaaaaaaaagtgtctttatctcaatccttagtccttcccttttccctgtatctgccttaaaccaaagggcttctcataggagcccagggaaaggactgcttttgtagtctagatttttgtcctgctgccttgcgtttgccctcatcccaggaccctgtgacacggtgcctgagaggcaggcatggagttctctttaccggcctcctccacagctggcccactgccatgccagctgcaaagaaaaggggtgcagagagaatgactgaaaggtcaagcccctcctggctcactacacttggccgagactcctctgcctgccttaccctcctgccttcccgagcctgggacgagtggattcccagaggcaaatctgccatgcttgcttttttctatattgtattcagacaagagatgggaaagatggggaaggagaagggacggtcagtttgaacctacctttcccccgtgcgtacagcctgctggtgggctctgtctgtcggtggagggcagtattaagtgggattggggagagagtgagggaaaggctcctggagattgggagaacctgctggggccagtgagaagactagagggtgtggtgattggtggctacagcaaacactaaggaacccttcattcccacttcccatctgcacctctgctctccccccaaatcaatacactagttgtttccatcccgaaaaaaaaaaaaaaaaaaaaaa

SEQ ID NO: 3455 - DNA, 2224 bp, Rattus norvegicus
  Genbank Accession No. X67504
caattcccagaagggggcgatggcaccgcgcacgctgctcctgctgctggcggccgccctggccccgacccaaatccgcgcgggctcacactcgttgcggtatttctacaccgccatgtcccggcccggcctcggggagccccggttcatcgaagtcggctacgtggatggcacagagttcgtgcgctacgacagcgacgcggagaatccgagatatgagccgcgggcgcggtggatggagcgggaggggacggagtattgggagagggagacaaggagagccaagggagacgagcatatgttccgagtgagcctgaggaatctgcgcggctactacaaccagagcgagggcggctctcacaccatccagaggatatatggctgtgtcatggggtcggacgggatcctcctccgcggatattggcagttcgcctacgatggccgcgattacatggccctgaacgaagacctgaaaacgtatacggctgcggactttgcagcaaggatcacccggaacaagtgggagcgggttggtgctgcacagagtcagaaggcctacctggagggcaagtgcatggtgtggctcagcagacacctggagcaagggaaggagacactcgtgcgctcagatcccccaaaggcacatgtgacccttcaccccagacctgaaggtgatgtcactctgaggtgctgggccctgggcttctaccctgctgacatcaccctgacctggcagttgaatggggaggacctgacccaggacatggagcttgtggagaccaggccttcaggggatggaaccttccagaagtgggcagctgtggtggtgcctcttgggaaggagcagaattacacatgccttgtggaccatgaggggctgcctgagcctctcaccttgagatgggaacctcctccatccacagacttcaacatggtaatcatcactgtcctggttgtccttggagctgtggccatcattggagttgtggtggctgttgtgatgaagtggagaaacccaggaggaacaggaggagactacgcccctgctccagcacgaagacagctgcctggagtggactgagtgacagattatgtgttcaggtctctgctgtgacatccagagtcctctgttctctttacacaccagtgtctcatgttccttgtgattttgtgggtttgctgtgaagaactgtggaacccagcctgcccctgcctttcagggccctgtctgcactgccctgtgttctcttccacagccaaccttcctgttctgaaatggaaactcagggatctcaggaaagtcgtttggatggtgttttgctgtggcaaacaggaggaatgtttccttacagtgacacaggtgtgaaagactgagattgactggggaaggaatgtttccctcagacagacacaggagagaggatgttctgctaaagcaagcgcatgaaaggacacgcgatgaaggagactttgctcacaacatgcatgtattggtccgccttacattgcgcactcgagctgtatttgtcacggctccatagtgagaaatgcaccaattaacttctggtggtgtgctgcactctgttgctgcttccgaggactgtggctgactgaatgcatatgctgagcaagactcgttctgagtcaaggcactggaggacacgcaatgttcagagggtataaatagggctccacagagtgactgacacagaggtggtcttgctacagctcaccttggaacgcttatgagactttgctgatctctgcttccctgacagaggcccagctgagaacctctcctggggttcctgttggtccctccagctgactcctgccaggcctggctctctctgcttggtgatgccactgttgttcacctgactacaaactggactgctggtgtacacgaggtgtttgcaagtgggtagagctgctgccgacctgtgaactgaactgattgccacacagtccacatgtggtcggaaagctgccctgggctctccctgtggcatgctgctgtggtgatttctgcttctccttcctggtgtctttcccagggttctgagggtctggtgtggtctgtctgctcctctctcaggagacctccacagctgagataagacctaacagagaggcttctccctgtaacttgggtaccgattcctgaacctggactgtcttaccttttccgtctggtgttctggagttaactccctgaagtctc

SEQ ID NO: 3456 - DNA, 1565 bp, Rattus norvegicus
  Genbank Accession No. X69834
cttttctcctgatggctgggatctgccctgctgtccttggcttcccagatggcacactgggaaatgacactctactccataaagatcaagacaaggggacacaactggacagtctcacattggagtccatcaacactgactttgccttcagcctttacaagatgctggctttgaagaatccagataaaaatgttgtcttctccccacttagcatctcagctgccttggccattgtgtccctgggagcaaagggcaacaccctggaagagattctagaagttctcaggttcaatctcacagagagctatgagacagacatccaccagggctttgggcacctcctccagaggctgagtcagccaggggaccaggtaaagatcatcacaggcaatgctctgtttattgataagaaccttcaggtcctggcagagttccaggagaagacaagggctctgtaccaggttgaggccttcacagctagcttccagcagcctcgtgtgaccgaaaagctcatcaatgacagtgtgagaaatcagacccaggggaagatccaggaactggtctcaggcctgaaagagaggacatccatggtgctggtgaacatcctcctctttagaggcaaatggaaggtgccctttgaccctgattacacatttgagtctgagttctacgtggatgagaagaggtctgtgaaggtgtccatgatgaaaattgaggaactgactacaccttacttccgggatgaggagctgtcctgctctgtgctggaactgaagtacacaggaaattccagtgccctgttcatcctccctgataagggcaggatgcagcaagtggaagccagcttgcaaccagagaccctgaagaagtggaaggactctctgaggcccaggaagatagatgagctctacctgcccaggttatccatttccactgactatagcctggaggaggtccttccagagctgggcattagggatgtcttctcccaacaggctgatctgagtaggatcacaggggccaaggacctgagtgtctctcaggtggtccacaaggttgtgctggatgtgaatgagacaggcacagaagcagctgctgccacaggagccaatttggtcccacgtagtggaaggccacctatgattgtgtggttcaacaggccattcctgatagctgtctctcacacacatggtcagcatatcctctttatggccaaagtcattaaccccgtgggagcctaaagctcccaatatctaatagttctacccaggtccatgagaccgagcctgcatgtggatctctgtgtataacccaaccttcaaactctgattggctgttgcaaagttggcttagacagtgacatcgactatctctgtggctcccagacattcaggagcgtttggactgtaatgtcaggttctcaggcccttgggagcatctgcacatgtttctgaacctggaatctgtcttttttcttcttcccttgtgactcctctttctgtgttcataccccaaacctagccactgtcaagtacacccagtcccaataaaggctttgagcaccg

SEQ ID NO: 3457 - DNA, 852 bp, Rattus norvegicus
  Genbank Accession No. X70223
aattcggcacgagcgcgatggcacctgccgcgtcaaggctgagggtggaatccgagctccggtcgcttcccaagcgagcgctcgcccaatacttgctgtttctaaagttctatccggtggtcaccaaagctgtcagcagtggcattttgtcagcccttggaaaccttctggcccagatgattgagaagaagcagaaaaaagactctcgaagtctagaagtcagtgggcttctcagatatttagtttatgggttgtttgtcacaggtcccctgagtcactacctctacctcttcatggagtactgggtccctcctgaggttccctgggccagagtcaagaggctcctgctggatcgcctgttctttgccccaacctttctgctgctgttcttcttcgtcatgaacttgctggagggaaaaaacatcagtgtctttgttgccaagatgaggagtggcttctggcctgctctgcaaatgaactggaggatgtggacacccttacagttcatcaacatcaactatgtgcccttgcagttccgggtgctctttgccaacatggcagctctgttctggtatgcctacctggcctctctggggaagtgatgtctgatacaccgtggatgaggtgtggggagatccaaccaccagcaggagagagcagaatccatcattaaggacacctcatgactaaattatgtgattcaagatgccttaaaattacagagggaggaacgtgtcagtgtcggaatcatgtgcttcaaagagacagcactagtctcggtggagttaatcttagttgtcactgcaaacaggtaaaggtcaataaacagtgatgcagcctcgtgccgaattc

SEQ ID NO: 3458 - DNA, 1739 bp, Rattus norvegicus
  Genbank Accession No. X70900
gcaggccccacgctgctggctgctgctgccacccttgcctcccgggctgcccgctgctgtggggacaccatgccccttcccaggcccggagactaaccccaaacctgcaccatctccggcgaaccccagggttccgccccagcccaacaggtcaacctgggaatcattaacaagagtccctgacatggcgaaggagggtggccggactgcaccatgctgttccagacccaaggtggcagctctcactgtggggaccctgctgttcctgacaggcattggggctgcgtcctgggccattgtgaccatcctactacggagtgaccaggagccactgtaccaagtgcagctcagtcccggggactctcgacttttggtgttggacaagacagagggaacgtggaggctgctgtgctcctcacgctccaacgccagggtagcagggctcggctgtgaggagatgggctttctcagggctctggcgcactcagagctggatgtgcgaaccgcgggcgccaacggcacatcgggcttcttctgcgtggacgagggcggtctgcctctggctcagcggttgctggatgtcatctctgtatgcgactgtcctagaggccgattcctgactgccacctgccaagactgtggccgcaggaagctgccggtggatcgcattgtggggggccaggacagcagcctgggaagatggccatggcaggtcagcctgcgttatgatgggacccacctctgtgggggatccctgctgtccggggactgggtactgaccgctgcacactgctttccagagaggaaccgggtcctgtctcggtggcgagtatttgctggtgctgtagcccggacctcacctcatgccgtgcagctgggggttcaggctgtgatctatcatgggggctaccttccctttcgagaccctactatcgacgaaaacagcaatgacattgccctggtccacctctctagctccctgcctctcacagaatacatccagccggtttgtctccctgctgcgggacaggccctggtggacggcaaggtctgtacagtgaccggctggggtaacacacagttctatggccagcaagctgtggtgctccaagaggcccgggtccccatcataagcaacgaagtttgcaacagccccgacttctacgggaatcagatcaaacccaagatgttctgtgctggctatcctgagggtggtattgatgcatgccagggtgacagcggaggccactttgtatgtgaggacagaatctctggaacatcaagatggcggctctgcggcattgtaagctggggtacgggctgtgctttggcccggaagccgggagtgtacaccaaagtcattgacttccgggagtggatcttccaggccataaagactcactccgaagctaccggcatggtaactcagccctgaccccgcctcatcgcctgctccgcgctgctccagcatccagagtcagagttggtctggtggctccagccgcacgtggcaggctccacactgggcctcacatggaacggttttctgctcggatccagtccatagatccaaggatgctgggtccaaggacctctcttccacagtggccggcccactcaatcccagggccattggcctcaccctcccaccccatgtaaatattactctgtcctctgggggctgctttcgaggcgccccttgtgcggatgctctttaaataataaaggtggttttgatt

SEQ ID NO: 3459 - DNA, 1277 bp, Rattus norvegicus
  Genbank Accession No. X71898
tgcggccgcgaagaacccatgggcctcctgaggcggcggctgctgctgctggtggtggtggtgacgacctgtgtcccagcctcccagggcctgcggtgcatacagtgcgaaagtaaccaggactgcctggtggaggagtgtgccctgggccaggacctctgcagaaccacggtgcttcgggaatgggaagacgccgaggagctggaggtggtgaccagaggcctgtgccacaaggagaagaccaacaggaccatgagctaccgcatgggctcggtgatcgtcagcctcaccgagaccgtgtgtgccacaaacctctgcaacaggcccagacccggagcccgagggcgaccttttccccggggccgttaccttgagtgtgcatcctgcacctctctggaccagagctgtgagaggggccgggagcaaagcctgcagtgccggtatcctacagaacactgtattgaagtggtgacgctccaaagcacagaacggagcgtgaaggacgaaccctacaccaaaggctgtggcagtcttcccggatgcccgggcacagcaggtttccatagcaaccagacctttcacttcctgaagtgctgcaacttcacccaatgcaatggtggcccagttctggatcttcagagcttaccaccgaatggcttccaatgttacagctgtgaggggaacgagcacctttggatgttcctacgaagagacgtcctcattgactgccggggaccaatgaatcagtgcttggaggctacaggcttagatgtgctgggaaaccggagttacaccgtaagaggctgcgccacggcttcctggtgccaaggttcccacgtggccgactccttccagacccacgtcaacctctctatctcctgctgtaatggcagtggctgtaaccgccctacagggggcgcccccgggccaggccctgctcatcttatcctcattgcctccctgctcctgaccctcagactgtggggcatccctctctggacctgaatcctgagccgtctgccctggctggacccaggaacttttgactcctccgcctctgctccatctttgaggacaggcgtgctgtattgtcttcttgggcctcaagaactggaagagaattgagaaaagggctgcgggccagcaggggggcctcttggttgagttaatattgttgctgttattattattatcattgttattaccctaatttattatgtaaatatatatataagatttttgtaccagtaaaaaaaaaagcggccgcagaattcgat

SEQ ID NO: 3460 - DNA, 402 bp, Rattus norvegicus
  Genbank Accession No. X72792
tctgccgctcagacgatcacgcggttagtggatccttgttcacgcctcttcctgcagttctaggccacgagggagctggcattgttgagagcattggagaaggggtgacttgtgtgaaaccaggtgataaagtcatcccgctgttctctccccagtgtggaaaatgcaggatctgcaagcacccggaaagcaacctctgttgccaaactaagaatctgacacagcctaagggagctttgctggacggcaccagcaggttctcctgcaggggaaagcccattcaccacttcatcagcaccagcaccttctcccagtacactgtggtagatgacatagcggtggccaaaatcgatacggctgcaccgctggacaaagtctgcctcatcggctgtggcttctcga

SEQ ID NO: 3461 - DNA, 1525 bp, Rattus norvegicus
  Genbank Accession No. X73653
ggccaagagaacgaagtcttttttttttttttcttgcgggagaacttaatgctgcatttattattaacctagtaccctaacataaaacaaaaggaagaaaaggattaaggaaggaaaaggtgaatcgagaagagccatcatgtcggggcgaccgagaaccacctcctttgcggagagctgcaagccagtgcagcagccttcagcttttggtagcatgaaagttagcagagataaagatggcagcaaggtaaccacagtggtggcaactcctggacagggtcctgacaggccacaggaagtcagttacacagacactaaagtcattggaaatgggtcatttggtgtggtatatcaagccaaactttgtgactcaggagaactggtggccatcaagaaagttcttcaggacaagcgatttaagaaccgagagctccagatcatgagaaagctagatcactgtaacatagtccgattgcggtatttcttctactcgagtggcgagaagaaagatgaggtctaccttaacctggtgctggactatgttccggaaacagtgtacagagtcgccagacactatagtcgagccaagcagacactccctgtgatctatgtcaagttgtatatgtaccagctgttcagaagtctagcctatatccattcctttgggatctgccatcgagacattaaaccacagaacctcttgctggatcctgatacagctgtattaaaactctgcgactttggaagtgcaaagcagctggtccgaggagagcccaatgtttcatatatctgttctcggtactacagggcaccagagctgatctttggagccaccgattacacgtctagtatagatgtatggtctgcaggctgtgtgttggctgaattgttgctaggacaaccaatatttcctggggacagtggtgtggatcagttggtggaaataataaaggtcctaggaacaccaacaagggagcaaattagagaaatgaacccaaattatacagaattcaaattcccccaaatcaaggcacatccttggacgaaggtctttcggccccgaactccaccagaggcaatcgcactgtgtagccgtctcctggagtacacgccgaccgcccggctaacaccactggaagcttgtgcacattcattttttgatgaattacgggacccaaatgtcaaactaccaaatgggcgagacacacctgccctcttcaactttaccactcaagaactgtcaagtaacccacctctggccaccatccttatccctcctcacgctcggattcaggcagctgcttcaccgcctgcaaacgccacagcagcctcagatactaatgctggagaccgtggacagaccaataacgccgcttctgcatcagcctccaactctacctgaacagccccaagtagccagctgcgcagggaagaccagcacttacttgagtgccactcagcaacactggtcacgtttggaaagaaaattaaaaagaggaaaacaaaaacaaaaacaaaaaacccc

SEQ ID NO: 3462 - DNA, 1401 bp, Rattus norvegicus
  Genbank Accession No. X74402
aagagcgggcgctggtaccaaggcctgaccatggatgaggaatacgatgtgattgtgctggggacaggtcttaccgaatgcatcctgtctggcatcatgtctgtgaatggaaagaaggtgttgcacatggaccgaaacccctactatgggggtgagagctcttctatcacaccccttgaggagctatataagcgctttcagttgctggaagggccccctgaatcaatgggccggggccgagactggaatgttgacttgatccccaaattcctcatggccaatggtcagctggtaaagatgctactgtatacagaagtgactcgttatctggacttcaaggtggtagagggcagctttgtatacaaagggggcaagatctacaaagtgccatctactgagactgaggccttggcttctaatctgatgggcatgtttgaaaaacgacgcttccgaaaatttttggtgtttgtggcaaactttgatgagaatgaccccaaaacctttgagggtgttgacccgcagaccaccagcatgcgtgatgtctaccggaagtttgacctgggccaagatgtcattgatttcactggccatgccctggcgctctaccgcactgatgattacctggttcagccatgtcttgagactattaaccgcatcaagttgtacagtgagtccctggcccggtatggcaagagcccatatttgtacccactctatggcctgggtgagctgcctcagggctttgccagattgagtgccatctatgggggaacatacatgctgaacaaaccagtggatgacatcatcatggaaaatggcaaggtggtgggtgtaaaatctgagggagaggtggcccgctgcaagcagctgatctgtgatcccagctacatcccagaccgtgtgcgaaaggctggccaggttattcgcatcatctgcatcctcagccaccccatcaagaataccaatgatgccaattcctgccaaattatcatccctcagaatcaggtcaacaggaagtcagacatctatgtgtgcatgatctcctatgcacacaacgtggccgcacaaggcaaatacatcgccattgccagcaccaccgtagagactgcagaaccagaaaaggaggttgagcctgcattggagctgttggaacctattgaccaaaagtttgtggctatcagtgatttatatgagcccattgatgacggttcagagagtcaggtgttctgttcctgctcctatgatgctaccacacactttgagacaacctgcaatgacatcaaagatatctacaaacgcatggctggttctgcctttgattttgagaacatgaagcgcaaacagaatgatgtctttggagaagccgatcagtgattgctgactcccctcctccagcccctg

SEQ ID NO: 3463 - DNA, 2093 bp, Rattus norvegicus
  Genbank Accession No. X74549
ctctggtctcatctctgccacgccactgctcagaggcacagagtgagcaacagtttggtagcgctgagtccatccactggaaattctcctcctgtctcagcggctttagctctgcagaaatgaagcatccagcctacactctccttctctctctcatcatgtctatgtgtgctgggagcaaaggccttgctgagcagctaactaaggaaaacctgaccgtgtccctcctgcctcctaacttccacaaagagaacacagtcaccaatgactggattccagaaggagaggaagatgacgactacctggacctggagaagctgctcagtgaagatgacgactacatctatgttgtcgatgcagtttccccaacagactcagaatcaagtgctggcaacatcctgcagcttttccaaggcaaaagccggatccagcgccttaacatcctcaatgcaaagtttgccttcaacctttaccgagtcctgaaggaccaggctacctcttctgataacattttcatagcacccgttggcatttccactgccatggggatgatctccttaggtttgaggggagagacccatgaggaagtacactcagttctacacttcaaagactttgtcaatgctagcagcaagtacgaggtgacaaccattcacaacctctttcgaaagctgacccatcgcctattcagaaggaattttgggtacacacttcagtcagttaatgacctttatattcagaagcagtttcccatacgggaggacttcaaagctgccatgagagagttttactttgctgaggcccaggaggctgacttctcagatcctgccttcatatcaaaggcaaacagccacattctgaagctcaccaagggcctcataaaagaagctttggagaatacagactctgctactcagatgatgattctgaactgcatctacttcaaaggagcttggatgaataaattcccagtagaaatgacgcataaccacaacttccggctgaatgagagagaagtagtaaaagtctccatgatgcaaactaaagggaacttccttgcggcaaatgaccaggagctagactgtgacattctgcagctggagtatgtagggggcatcagcatgctaattgtaattccacggaagctgtcgggaatgaagactcttgaagcacagcttacaccccaggtagtggagagatggcaaaaaagcatgacaaacagaacccgagaggtacttctgcccaagtttaagcttgagaagaattacaacctggtggaggtcctcaagtccatgggaatcacaaagctcttcaacaagaatggcaatatgtcaggcatctcagaccagaggatcatcattgatctgttcaagcaccagagtaccatcacagtgaatgaagagggtacccaagctgcagctgtaactacagtggggtttatgccgctgtctacccaagtcagattcactgttgaccgtcccttcctgttcctagtgtatgagcaccgaaccagctgtctgctgttcatgggaagagtggccaaccctgccaagtcttaatggtgctggtctgggcacctgatgtagtttggggacactctgtaatcctgttttcattctaagaggacagagatattttgatattgataatctatgtagtttgagataataatctaacagtaaacagtgtcataagtgcacagatgttaatgcaactaatggtcgtgccagctattccctagaggtcctagacacagactgcctcagcgccaacgcctctgtcactgagaatgggcagagtggagctgacactttctcctcagttagccgtaccagtcaaggtgtctcctcagccaggcccctccatatggatggtactgaggaactctcacccttccagggaggatgtccaaggagcaccattcttgcctagtggaaaagaaacctcaacatgtctgagacatttggacttaattcaaggctgaaccttttaaattcatgtaaatatcatctgttctgctttgtgtcaatagggctaccatagcctattctagagacaaataaacaaccatatttactaagcaaaaaaaaaaa

SEQ ID NO: 3464 - DNA, 2277 bp, Rattus norvegicus
  Genbank Accession No. X74593
ccaccagcgacagaatttactattggaagcagtttgagaaagctcaggtgttggccatggtcttctccagcagagtcttttttttttcacgtgtccccttactccagacccttggcggtttgacgagcagaaacaccagctccccgccggatccagccgacacctcaaagcaagagagcgacatggcagctcctgctaagggcgagaacctgtccctggtggtgcacggacctggagacattcgcctggagaactacccaatccctgagctgggcccaaatgatgtgttactaaagatgcattcggtggggatctgtggctcggatgttcactactgggagcatggccgaattggggacttcgttgtgaaaaagccaatggtgcttgggcatgaagctgctggaacagtcacaaaagtgggaccgatggtgaaacatctaaaaccaggagatcgggtggccatcgagcctggcgttccccgagaaatagatgaattctgcaagatcggccgatacaatctgacgccatccatcttcttctgtgccacgcccccagatgatgggaacctctgccgcttctacaagcacagcgctgacttctgctacaagcttcctgatagtgtcacctttgaagaaggggccctgattgagcctctctctgtggggatctatgcctgccgtcgaggttcggtttccctggggaacaaggtccttgtgtgtggagctgggccaattgggatagtcactttgcttgtggccaaagcaatgggagcttctcaagtagtggtgattgacctctctgcttctcggttagccaaggccaaggaagttggagcagactttaccatccaggttgccaaagagacccctcacgacattgccaagaaggtggaaagtgtgctggggagcaagccagaggtcaccatcgaatgcacgggagcggagtcctctgtccagacgggcatctatgccactcactctggcgggaccttggtggttgtgggaatgggccccgagatgatcaatttacccctagtgcacgcagctgtgcgggaggtggacatcaaaggcgtgtttcgatactgcaacacgtggccgatggcagtttccatgcttgcatcgaagactttgaatgtaaagcccttagtgacccataggttccccctggagaaggctgtagaagcctttgaaacagccaaaaagggactggggctgaaagttatgatcaagtgtgaccccaatgaccagaacccctaaatgtgattgctctatgcccttagcccactctctcagcatctaagggctaaatggaccagaaggggaagccattaatgcagaaccttctttttgaatggtaggaataataaactcataagccgagagccttagaggagctggcgtgccttaaagacagaagtaggggcaccttgggggacctcgtagccagaatgagatgcgtatactgagtaaagtctagaaccaagagtctggcagagaggtcccggaaatgccctttctcagtaccttctttgggtgaggagacgaagcatccttcgtccatgttccaatgtgggtgccagagagtggggctaacatggagaaatgacgtcattaacatgggagtggccccagagctgttcagagcacagtgtttcccaagtgtcatttgatttgaggggaataagggcactcagctctgcctcagctcagaattctgtccttacatttgcaaagtggaggccttcttcccaacagtgctcattcatgttcaggagcagtatcgttgctaagcaaccaggagtcttccacccaaagatcctaaatccagcctaactcatacaagagggccacaggagggcttgagtttcccactcacaggattcgcctcctctcccaggctcactcctaggcaattattatcccatcccactcagaagatgctccccttctcggctgttaaggctagtgatatctgatggatgggtatcacagagcctaattaaattatggggcttttctttataagatctgggtccaaatcatgccctttgtgatcttaagataatcaagaagagcacagtaactgtggtgtaacttgggctgcagtctgtaatccacctcttcagctatgagtaggggacacgtgaaaaaaaaaagactctgctggagaagaccatggccaacacctgagctttctcaaactgcttccaatagtaaattctgtcgctggtgttgaaaaaaaaaaaaaaaaaaaaaaaaaaaaaaaaaaaaaaaaaag

SEQ ID NO: 3465 - DNA, 3810 bp, Rattus norvegicus
  Genbank Accession No. X74800
gatagactcgagcggaatcgacgccggaggtcccaaggcccactcccacccagcctggccaggccggctacagtgggatccaggggtcgagactccgatccccctaagccaaagggcctgcaaggggcagtgcgggggggggggctagcccctccctcggtgaccgtgcgccggagcactgattaacgcgggcacggagcagggcaccaggtcgcaggatgcgctaccgggcgtcggccctgggcagtgacggggtacgagtgaccatggagagcgccttgactgcccgagaccgggtgggggtgcaagactttgttctgctggagaacttcaccagtgaggctgccttcattgagaacctccggcgtcgattccgggagaacctcatttatacctacattggccctgtcctggtctctgtcaacccctaccgggacctacagatctacacacggcaacatatggaacgctaccgtggcgtcagtttctatgaagtgccgcctcatctgtttgcagtggctgacactgtataccgggcgcttcgtactgagcgtcgggaccaagcagtgatgatttctggagagagtggggcagggaagacagaggccaccaagagattgctccagttctatgcagagacctgcccagcccctgaaaggggtggcgcagtgcgagaccgcctgttgcagagcaaccctgtgctggaggcctttgggaatgccaagactctccgcaacgacaactccagccgctttgggaagtacatggatgtgcagtttgacttcaagggtgcccctgtgggaggccacattctcagttacctcctggagaagtctcgagtggtacaccagaatcacggagaacggaacttccacgtcttttaccagctcctggaggggggggaggaggaggctcttcgtcgtctgggcttggaacggaacccccagagctacttgtacctggtgaagggccagtgtgccaaggtctcctccatcaatgacaagagtgactggaaggttgtgaggaaggcgctgtcagtcattgacttcactgaggatgaagtggaggacttgctaagcatcgtggccagcgtcctacatctgggcaatatccactttgctgctgatgaggacagcaatgcccaggttactactgagaaccagctcaaatatctgaccaggctccttggtgtggaaggcacaacactgagggaagccctgacccacaggaagatcatcgccaagggggaagagctcctgagcccactgaaccttgaacaggctgcatatgcaagggatgctcttgccaaggctgtgtacagccgcactttcacctggttggtcagaaagatcaataggtctctggcctctaaggacgctgagagccccagctggcgaagcaccacagttcttgggctcctggacatttatggcttcgaagtgtttcagcataacagcttcgagcagttctgcatcaactattgcaatgagaagctgcagcagctcttcattgagctgactctcaagtccgagcaggaggaatacgaggcagagggcatcgcgtgggaacctgtccaatacttcaacaacaagatcatctgtgacctggtggaggagaaattcaagggcatcatctccatcttggatgaagagtgcctgcgtcctggggaggccacagacctgaccttcctggagaagctggaggacacaatcaagcaccaccctcacttcctgacgcacaagcttgctgaccagaagaccaggaaatccctcgaccgaggggagttccgccttcttcattatgcgggagaggtgacctacagcgtgactgggtttctggataaaaacaatgacctcctcttccggaacctgaaggagaccatgtgcagctccacgaaccccatcatggcccagtgctttgacaagagtgagctcagtgacaagaagcggccagagacggtggccacccagttcaagatgagcctcttgcagctagtggagatcctgaggtctaaggaacctgcttatatccggtgcatcaagccaaatgacgccaaacagccgggtcgctttgatgaggtgctcatccgacaccaagtgaagtacctgggacttatggagaatctgcgtgtgcgcagagctggctttgcctaccgtcgaaaatatgaggctttcctgcagaggtacaagtcactgtgcccagagacatggcccgtgtggacaggacggccccaggatggggtggctgtgttggtcagacaccttggctataagccagaagagtacaaaatgggcaggactaagatcttcatccgattccccaagaccttgtttgccacagaggactccctggaagtccgacggcagagtctagccaccaagatccaggcggcgtggaggggctttcattggcggcagaaatttctccgggtgaagcgatcagccatctgtatccagtcctggtggcgcggtacactgggccggaggaaggcagccaaaaggaagtgggcagcccagactatccgtagactcatccgtggcttcattttgcgtcatgcaccccggtgccctgagaatgccttcttcctggaccacgtgcgcacgtcatttttgcttaacctgaggcgacaactaccccggaatgttctggacacctcctggcccacacccccacctgccctgagagaggcctcggagctgctccgggagctatgcatgaagaacatggtgtggaaatactgccggagtatcagccctgagtggaagcagcagctgcagcaaaaggcggtggctagtgaaattttcaagggcaagaaggacaattacccccagagtgtccccagacttttcatcagcacacggcttggcacagaggagatcagccccagagtgcttcaggccttgggctctgaacccatccagtatgcagtgcctgtggtaaaatacgaccgtaagggctacaagcctcgttcccggcagctgctgctcacacccagtgctgtggtcatcgtggaggatgccaaagtcaagcagagaattgattatgccaacctaactggaatctccgtcagtagcctgagtgatagcctgtttgtgcttcacgtgcagcgtgaagacagcaagcagaagggagatgtggtactgcagagcgatcatgtgatcgagacactaaccaagacggccctcagtgctgaccgtgtgaataatatcaacatcaaccagggcagcatcacgtttgcagggggtccaggcagggatggcatcatcgacttcacatctggctcagagcttctcatcaccaaggctaagaatggccacctggctgtggtggccccacggctgaattctcggtgatgaaggtgccggtggacccctcctgactcctgatgctttgcttagtcccctcctcccctcccagttaccaaagactcaagcttccagacagggatccagggacaccctcaaagcccacctgcagactcctgccccctgctcatcctctcttgaggtgatcaggaaccagggagcttccccaggagtgggccaggccgggccaagcaatagaaaagcagaggtctgagcaggccaggccagccctctgctgatgccaaatatctaagagaagggaattttaactgaggttttctctgagactttttgatgctttataggaaactatttttttaaaaaagtcattttcctatcctaaacacactggatgtgttttccctgactcaaacaggacaaggaatgtagctgaaagactgactgggctggctgaggccccccctctctgccaagcctctcctca

SEQ ID NO: 3466 - DNA, 1832 bp, Rattus norvegicus
  Genbank Accession No. X74834
ctggtggggcctgatagagctggcagggttggctgggaggggcgtgtaggctgacacaggacactccaaccccccaaccccaagacctgtaaagctactgtcctactcatcactgggcagaactgaggcaccatgcacgggggccagggacctcagctcctcttgctgctgctggctacctgcctgggggcccagagccgcaaccaagaggagcggctgcttgcggacctgatgcgcaactacgacccccatctgcggccggctgagcgtgactcagatgtggttaatgtcagcctgaagcttaccttaaccaacctcatctcccttaatgagcgagaggaggccctcacgactaatgtctggatagaaatgcaatggtgcgactatcgcctacgctgggacccgaaagactacgaaggcctgtggatattgagggtgccatctaccatggtctggcagcccgatatcgtgctgggaaacaatgtggacggtgtcttcgaggtggcgctctactgcaatgtgctcgtgtcccctgatggttgtatctactggctgccgcctgccatcttccgctcctcctgctccatctctgtcacctacttccccttcgattggcagaactgctccctcgtcttccagtcccagacttacagcaccagcgagatcaacttgcagctgagccaggaggatgggcaagccattgagtggatcttcattgaccccgaggctttcacagagaatggggaatgggccatccggcatcgaccagccaaaatgctactggatcctgtgactccagcagaggaggcaggccaccagaaggtggtgttctacctgctcatccaacgcaagcccctcttctatgtcatcaacatcatcgtcccctgtgtgctcatctcctcagttgcgatcctcatctacttccttcctgccaaggcgggcggccagaagtgcacagtggccaccaacgtgctcctggcccagaccgtcttccttttcctcgtggctaagaaggtgcctgagacctcccaggcagtgccgctcatcagcaagtacctgaccttcctcatggtggtgaccatcctcatcgttgtgaactctgtggtcgtgctcaatgtgtccttgaggtccccacacacacactccatggcccggggggtccgcaaggtgtttttgaggctcctgccccagctgttacggatgcatgtgcatcctcgggctcctgctgctgtccaggatgcccggctgcgactccagaatggctcttcctcagggtggcccatcatgactcgagaggaaggggacctctgtttgcctcgaagcgaactcctctttaggcaaaggcagcgcaatggattggtgcaggcagtactggagaagttagagaatggtccagaaatgaggcagagccaggagttctgtggcagcctgaagcaagcctccccggccatccaggcctgtgtggatgcctgtaacctcatggcgcgtgcccgacaccagcaaagtcactttgacagtgggaatgaggagtggttgctggtgggccgagtgctggaccgagtctgtttcctagccatgctctccctcttcatctgcggcactgctggcatcttcctcatggcccactacaaccaggtgcctgacctgccattccctggagacccccgcccctacttgcctttgccagactgagccaaccaatcactcctgcgccctggagtcagccatgtgggtcatgctgtttatggagctgtattctctgttgatcctgatgggctcctggggagcaatcattcttgggagaagatagaggaataaaggaataggaataa

SEQ ID NO: 3467 - DNA, 1315 bp, Rattus norvegicus
  Genbank Accession No. X75309
gaattcgggtcctgttgtccctgcctctccttctgggtcctgcagtccttcaggagactgggtcttattctctgatcttcctctacaccgggttgtccaggcccagcaaaggccttccgaggtttcaagccaccgcatttctcaacgatcaggccttcttccactacaacagcaacagtgggaaggcagagcccgtggaaccctggagccatgtggaaggaatggaggactgggagaaggaaagccagcttcagagagccagggaggagatcttcctcgtgaccctgaaagacatcatggactattacgaggacagtacagggtctcacacctttcagggaatgtttggttgtgagagcacaaataacagaagcagtggagcagtctggaggtatgcctacgatggagaagatttcatcgaattcaacaaggaaatcccagcctggatccccttagacccagcagccgcaaacaccaagctgaagtgggaggcagaaaaggtctatgtgcagcgagccaaggcatacctagaggaggagtgtcctacaatgctgaagaagtacctgacctacagtagatgtcacctggaccgaacagatcctcccactgtgaaaatcaccagccgtgtggccccaggaagaaacagaatattcagatgtctggcctatgacttctacccacaaagaattagtctgcactggaaccaggccagcaagaagctggcatctgaaccagaaagaggtgtttttcccaatggaaatggcacttacctctcctggatggaggtggaagtccccccacagaacagagacccctttgtctgccacatagaacacaaggggctatcccaatctctctcagtgcagtgggatgagaaaagtaaagtctgaaaacagtgctgtatctcagcctcagaaaggttaccctctctgccggatatgagagagttgaacttcagaagtcactgtcaccagcaagccagcaagtctccaaggaatgggtgtgggcccagaagatttgaataccaagcaccaagttcactctcaaagtcaaatcaatcaccttgccttgtaaaactcctcctcaattaatctgtaagcccttgcaattaccttcacgcccagcacagcacagaaaggcactttaaactctgagatgctacagaagtgtgagttgattttatcatgtatactgccccgacatacttgattcatgggaatgtctccatattcaatcaaagacggtctcctagtttcatttctgatactgtaagaaaatatcccaaacaaaagcgacttcaacagaaaaaaaaaaa

SEQ ID NO: 3468 - DNA, 896 bp, Rattus norvegicus
  Genbank Accession No. X75856
gaatatatttgatcggaagatcaactttgatgccctcttaaaattttcccacataactccctccacacagcagcacctaaagaaggtctatgccagttttgcactgtgcatgtttgtggcagcagcaggggcctatgtccatgtggtcacacgtttcatccaggctggcctgctctctgccctgggcgccctggccttgatgatttgcctgatggccacacctcacagccatgagacggagcagaagaggctgggactgctcgccgtcgccttccttacaggagttggcctgggacctgccctggagctgtgcattgccatcaaccccagcatcctccccacggccttcatgggcacggccatgatcttcacctgcttcagcctgagtgccctctacgccaggcgccggagttacctctttttgggaggtatcttgatgtcagccatgagcctcatgttcgtgtcctctctggggaaccttttctttggatccatttggctgttccaggcaaacctgtacatggggctgctggtcatgtgcggctttgtcctcttcgacactcagctcattattgaaaaggctgaacacggagacaaggattacatctggcactgcattgacctcttcttggacttcgttacactcttcaggaagctcatgctgatcttggccttcaatgagaaggacaaaaagaaagagaagaagtgacgtggtgatcgatcggcctctcccagctcgccttctctccctcagccccgtttctttgcacacatcacaggtgtcgtgtcccatgaaatgaaaagcatcaggaaagcttttgtactttgtggttttctctattttgaattttttgatcaaaaaactgattagtgaatatagtttggagtttggcttc

SEQ ID NO: 3469 - DNA, 691 bp, Rattus norvegicus
  Genbank Accession No. X78167
catcaggtgagccaagatgggtgcatacaaatacatccaggagctgtggaggaagaagcagtccgacgtgatgcgcttccttctaagggtccgctgctggcagtaccgccagctctctgcgctgcacagggctccccgccccacccggcctgataaggctcgaaggctgggatacaaggctaagcaaggttatgtcatttacaggatccgtgtccgccgcggtggtcgcaagcgcccagttcctaagggtgcaacctacggcaagcctgtccaccacggtgttaaccagctgaagtttgcccgaagccttcagtctgttgctgaggagagagctggccgccattgtggagctttgagagtcctgaattcctactgggttggtgaagattccacatataaattttttgaggttatcctcattgatccattccataaagctatcagaagaaatcccgacacccaatggattaccaaaccagtccacaagcacagggagatgcgtgggctgacatctgctggccgcaagagccgtggccttggaaagggccacaagttccaccacaccattggtgggtctcgccgtgcagcctggagaaggcgcaacactcttcagctccaccgttaccgctaattgacgtaatatttgtaaaattcatatccaataaacaacttaggacagtcaaaaaaaaaa

SEQ ID NO: 3470 - DNA, 943 bp, Rattus norvegicus
  Genbank Accession No. X78603
actccgcccgtgctgggtctgtcgatcctcgttccgtcaaggaccgtgaaggggtcaacgtgaggtcggtggggttagtaacgcggtggcggcggctcctcctccaaaatttgagcaggtacagggtgccaaacaggatgtacacgctgctttccgggctgtacaagtacatgttccagaaggatgaatactgcatcctgatcctgggcctggacaatgctgggaagacgaccttcctggaacagtcaaaaacacgatttaacaagaactacaagggaatgagtctatccaaaatcaccactaccgtgggtctaaacattggcactgtggacgtaggaaaggctcgtctcatgttttgggacttaggtgggcaggaagagctgcagtcgttgtgggacaagtactatgcagagtgccatggtgtcatctatgtcattgattccactgatgaggagaggctgtcagaatcaaaagaggcatttgagaaggtggtttcgagtgaagcactggacggtgttcccatcctggtgttggccaacaagcaggatgtggagacttgcctctccattcctgacatcaagactgcattcagtgactgtacctgcaagattggcaggcgagattgtttgacccaggcctgctctgccctcacaggcaagggagttcgagagggcatcgaatggatggtgaagtgtgtcgtacggaatgttcaccggccaccacggcagagggacatcacataagcaccttcatcctcacagtcttggactgttcatcccctagtgttggaagagtattctctgctggcttctgtcctcctgatgctgggggttgagctgggtttgtctgttcatttttatttgctttatgttttctctaagacaaacttttctctgtgtctggaaaagtgtaggtattcagagacaaaaaaaaaaaaaaaaaa

SEQ ID NO: 3471 - DNA, 1052 bp, Rattus norvegicus
  Genbank Accession No. X78848
gcagcggggaccttattggactatctccccttaagtgggaagggcttagtcaaatgcagtaaagagctataaaacaccgagaactcttgatgtgttgtgaaacttagagggagcagctttttaacaagagaactcaagcaattgctgccatgccggggaagccagtccttcactatttcgatggcagggggagaatggagcccatccggtggctcctggctgcagctggagtagagtttgaagaacaatttctgaaaactcgggatgacctggccaggctaaggaatgatgggagtttgatgttccagcaagtgcccatggtggagattgatgggatgaagctggtgcagaccagagccattctcaactacattgccaccaaatacaacctctatgggaaggacatgaaggagagagccctcatcgacatgtatgcagaaggagtggcggatctggatgaaatagttctccattacccttacattccccctggggagaaagaggcaagtcttgccaaaatcaaggacaaagcaaggaaccgttactttcctgcctttgaaaaggtgttgaagagccatggacaagattatctcgttggcaataggctgagcagggctgatgtttacctagttcaagttctctaccatgtggaagagctggaccccagcgctttggccaacttccctctgctgaaggccctgagaaccagagtcagcaacctccccacagtgaagaagtttcttcagcctggcagccagaggaagccattagaggatgagaaatgtgtagaatctgcagttaagatcttcagttaattcaggcatctatggatacactgtacccacaaagccagccttcgaaagctttgcaacaatcgcatattttgactaaatgttgaccctacttattgggaggccaacacgttttctaatgcttctgtgttaattcatatagacatgactgatgaggaattgctgggatgctatttggttgtagttaaaatttgaaatcatgatcacttcctcagatattactttgaatctcaataaaaa

SEQ ID NO: 3472 - DNA, 443 bp, Rattus norvegicus
  Genbank Accession No. X81448
caagatcatcgaagacctgagggctcagatctttgcgaattctgtggacaatgcccgcatcgtcttgcagatcgacaatgcccgtcttgccgctgatgactttagagtcaagtatgagacggaactggccatgcgccagtctgtggagagtgacattcatggactccgcaaggtggtggatgacaccaacatcacgaggttgcagctggagacagaaatcgaagcgctcaaggaggagctgctgttcatgaagaagaatcatgaggaggaagtccaaggcctggaagctcagattgccagttctgggttgactgtggaagtggatgctcccaaatctcaggacctcagcaagatcatggcggacatccgtgcccagtatgaacagctggctcagaagaaccgtgaggaactggacaagtactggtctcagcagattgaggaga

SEQ ID NO: 3473 - DNA, 3949 bp, Rattus norvegicus
  Genbank Accession No. X82669
agtttcacttctgctcctaacctgtgtcaggtccttctgcccggacactgacgacactatggccattctcactcccattgggtgctgtgaaccctgtgaaccaatcagcgtcgtcatggtacaggagttataaagtccgcgcagcccgcgggactcagactcgtccggattctcacatgggggcgatggcaccgcgcacgctgctcctgctgctggcggccgccctggcccagacccagacccgcgcgggtgagtgcggggtcgggagggaaacggcctctgcggggaggcgcgggggcggttttggggaagccgggtccccgcgtcgcacaccagacctccgccccttctccacccgcgtcccgagccccgcgccctgctccccgcccggcccgcgctcccgcccgggttcccgggaggaggtcggggtctcaccgcgcgccgcccccaggctcacactcgctgcggtatttcctcaccgccgtgtcccggcccggcctcggggagccccggttcatcgctgtcggctacgtggacgacacggagttcgtgcgctacgacagcgatgcagagaatccgaggatggagccgcgggcgcggtggatggagcgggaggggccggagtattgggagcgggagacgcagggagccaagggacacgagcaggtgaaccgagtgaacctgaggaccctgcgcggctactacaaccagagcgagggcggtgagtgaccccgggtcggaggtcacgacccctccgcgtccccacacggccggggacttccgggtcccaagtccgaggttcgggagcagaaccgacccgggcccggtttccctttcagtttggaggagtccgcgggcggggcggggctggggcggggtctgaccgcggggtcctgcaggctctcacaccatccaggtgatgtttggctgtgacgtggggacggactggagcctcctccgcggatataggcaggacgcctacgacggccgcgattacatcgccctgaacgaagacctgaagacgtggacggcggcggactttgctgcacagatcacccggaacaagttggagcgggatggtgatgcagattattacaaggcctacctggagggcacgtgcttggagtcgctccgcagatacctggagctcgggaaggagaggctgctgcgctcaggtacgtggaccgcgggcttctcctcctctgcccttaggctggggctcagtcctggggaagaagaaaccctcagctgggtgatgcccctgtctcagaggggagacagcgtccctgggtctcctgatccctcatcacagtgactgcactgcctctcccagggcccagccttctccctggagagttctgagtccctctcaggagggcaaggagagaatttcccacttaacagcaagggctccctgctgtcagccatggcctctcccaggccaggttctctgctccgactctctgaggacactgactcctgtcctgctgagtgtgtcagcgttacacctcaggaccagaagtctcctttacctcatgggagacatggactccactacactaggctggttccccagtttctagaactttccaaagaacacattctcacagatccctccctgatgtggggtttgcctctcttccacaccccaattctctctcttcctacagtggagaatggtcccatgagcccttgtggggtaccctgaaggaacataaattgtgggatttcttttttcttttttctctctttttcttatcttttactttcttttttctttccttttctttccctttttttttttgaaggattattttgcttccagtcaagatttctctgcaaacacatattaaatcaattattttccattccctctttattctgtgaccacccatctcatgctataaaacatcacataaggacggccatgttgacccactcgaatcatgtggatttcctcttagcttctgagtccctcaggaaagtgtgcagttctgtgctgagggcaccagctctccctgcagctcactagtgagatgacagttgaagtgtcagacacacacagttcagtgtcatcattgatttaactgtgtcttgtgtagatttcagtttgtcttgttaactgtgtgatttcttaaatcttccacacagatcccccagaggcacatgtgacccttcaccccagacctgaaggtgatgtcaccctgaggtgctgggccctgggcttctaccctgctgacatcaccctgacctggcagttgaatggggaggacctgacccaggacatggagcttgtggagaccaggcctgcaggggatggaaccttccagaagtgggcatctgtggtggtgcctcttgggaaggagcagaattacacatgccttgtggagcatgaggggctgcctgagccactttcccagagatggggtaaggagggagccttctgtagaccctgagctggtcagggctgagagctggggtcatgacccccaccttcatttcttgaacctgtccttcccagagccttctccatcgaccaactccaacatggaaaccaatgtcatttatgtcgcccttggagccatcattggaactctggccatcattggaattgtggtggctgttgtgaggaagaggaggagaaacacaggtaggaaaggacagggtctgtttcccctcagcttcctttagaagagtgctgctcattaatgggaagcacagccacaccccctattgctgctgctccaactgggtcctctgtcagttctggaaacttcctcctgtcaagaccttccttgaactctcacagcttttcttctcacaggtgggaaaggagactacgcccctgctccaggttagtgtgggcgcaggagtgtccctgagggtattggagtgaagctggagatgtggggagctctgggaatccatagtagctcctccaaatcttctggggctgcagttgtactgtgcgtgatatgaatacatacatacgcatatacatatacacacacacatatacatgtgttttgttttaccctaggcagggacagctcccagagctctgatgtgtctctcccagattgtaaaggtgactctggggtttgactgggaagggacaatgtggacatgattgggttcatggactcccagaatcctctgtttcatggactcccagaatcctctgggagtgttgtcttcacagtgatggtttgtgactctcgttctgtagcatgaagacagctgcctggagtggactgagtgacagacgatgtgttcaggtctctcctgtgacatccagagtcctcagttctctttagacaccagtgtctcatgttccctgtgattctatggcttcagtgtgaagaactgtggagcccagcctgccctgcacacctggaccctgtccctgcacctgccctgcattcctttccacctgccaaccttgctggtccagcctggggtaggggtaatgggacacgcacctgtcactccttgctgccctgagccttcagcccctcactccacactgagaataagactctgagtgtgaacttgattgttcacatccttgacccaagtgtggatggctttttaattactggattgagaatacttagaggttttttgttttggggttttgctttgttttgttttgtttttgaaaaaaataaatggcagatgaagaagcttccagaatctgtgtcactaagctgtgtgtgtctggtgggacagggtgaggtggtgggagctgagtgtggacagggctgtgcccaggtgtgctcagtcagttcttgtctttgatgggttcaggcctcagctctgtcacctccaggctgtgccctctccatcactgtgaacacatggggagagtctgtgatcgcgatgacacagggaaggccagagccttgtcctgtccccaggattatgagcccccgcggctgaagatcac

SEQ ID NO: 3474 - DNA, 1948 bp, Rattus norvegicus
  Genbank Accession No. X84004
gggcagaggtgagggagcaaaggactggcgggcgggaccgcggtgaagccagattaggatcagcgagcacttgaggatttagggccacaaaaaaccgcacaagatcgacagactatttctggagagctgcagaacgggcacgctggggtcgctggtgctggccatggtgatggaggtgggcatcctggacgccggggggctgcgcgcgctgctgcgagagcgcgccgctcagtgcctgcttctggattgtcgctccttcttcgccttcaacgccggccacatcgtgggctcagtgaacgtgcgcttcagcaccatcgtgcggcgccgcgccaagggcgccatgggcctggagcatatcgtgccgaacaccgaactgcgcggccgcctgctggccggagcctatcacgccgtagtgctgctggacgaacgcagcgccgccctggacggcgccaagcgcgacggcaccctggccctggccgcgggcgcgctctgccgagaagcgcgctccactcaagtcttcttcctccaaggaggatatgaagcgttttcggcttcctgccctgagctgtgcagcaaacagtccacccccatggggctcagcctcccgctgagtactagtgtgcctgacagtgcagaatccggatgcagctcctgtagcacccctctctacgaccaggggggcccagtggagatcctgtccttcctgtacctgggcagtgcttaccatgcttcccggaaagatatgctcgacgccttgggtatcactgctttgatcaacgtctcggccaattgtcctaaccactttgagggtcactaccagtacaagagcatccctgtggaggacaaccacaaggcagacattagctcctggttcaacgaggcgattgactttatagactccatcaaggatgctggaggaagggtgtttgtgcactgccaggccggcatctccaggtcagccaccatctgccttgcttacctcatgaggactaaccgagtgaagctggacgaggcctttgagttcgtgaagcagaggcggagtattatctcccccaacttcagcttcatgggccagctgctgcaatttgagtcccaagtactggcccctcactgttctgcagaagctgggagcccggccatggctgtccttgaccggggcacctctactacaacggtcttcaacttccctgtctccatccctgttcaccccacgaacagtgccctgaactaccttcaaagccccatcacaacctctccgagctgctgaagggccaggggaggtgtggagtttcacgtgccaccgggacgacactcctcccatgggaggagcaatgcaataactctgggagaggctcatgtgagctggtccttatttatttaacacccccccccccaaacacctcccgagttccactgagttcccaagcagtcataacaatgacttgaccgcaagacatttgctgaactcagtccgttcgggaccaatatattgtgggtacatcgagaccctctgacaaaacagggcagaagggaaaggactctgtttgagccagtttcttcccttgcctgttttttctagaaacttcgtgcttgacatacctaccagtattaaccattcccgatgacatacacgtttgagagttttaccttatttatttttgtgtgggtgggtggtctgccctcacaaatgtcattgtctactcatagaagaacgaaatacctcactttttgtgtttgcgtactgtactatcttgtaaatagacccagagcagactttcagcactgatggacgaagccagtgttggtttgtttgtagcttttagctatcaacggttgtatgtttgtttatttatgatctgaagtaatatatttcttcttctgagaagacattttgttactaggatgactttttttttatacagcagaataaattatgacatttctattg

SEQ ID NO: 3475 - DNA, 1601 bp, Rattus norvegicus
  Genbank Accession No. X85183
cgcatcactagtctgctctccctagctccgagctgctgtggccattgcctccagcgctgttttctgaggcctcgcctccgccgtctttcctgcccgagctccggtgcaaggcctccgctgccagacggtgcctggtgtcccgccgttcccatcctcggttggtccgccgttaggccgtgcctcaggcccaatccgcggcgacgccggcaggtgatgccaaatacagccatgaagaaaaaggtgctgttgatgggaaagagcgggtcggggaagaccagcatgaggtcgatcatctttgcaaattatattgcgcgcgacaccaggcgcctgggtgccaccatcgacgtggagcactcccacgtccgattcttggggaacctggtgctgaacctgtgggactgtggcggccaggacacctttatggaaaattacttcaccagccagcgggacaacatcttccgtaatgtggaggttctgatctacgtgtttgacgtagagagccgcgaactggaaaaagatatgcattattatcagtcgtgtctggaagccatcctccagaattcacctgatgccaaaatcttctgcctggtgcacaaaatggatctggttcaggaagatcaacgtgacctgatttttaaagagcgagaagaagacctgaggcgtttgtctcgcccgctggagtgcgcttgttttcgaacgtccatctgggatgagacgctctacaaagcctggtccagcatcgtctatcagctgatccccaacgttcagcagctggagatgaacctaaggaattttgcccagattattgaggctgatgaagttctgctgttcgagagagctacgttcttggtgatttcccactaccagtgcaaagagcagcgagatgtacaccgctttgagaagatcagcaacatcatcaagcagtttaagctaagctgtagtaaattggccgcttctttccagagcatggaagtgaggaattctaacttcgctgccttcatcgacatctttacatcaaacacgtatgtgatggtggtcatgtcagatccatccatcccttctgcagctactctgatcaacattcgtaatgccaggaaacactttgagaagctagagagagtagatggccccaagcatagcctcctcatgcgctgacataatgccaaatgctctttagtaaatgctgaattatggtgggtttttttttttgcatcatttgtttttaatattcataatgtcatgtgcttaaaagtgggctttgaaacgtgtgcttactatctcatctcttccctagtcttagtattggacgctatttactcagctatccagtagagatcctcaagacggcctttatgaaaagttagtgtggtgttaacactaaagtaggtggtgtgtatgggtgtgtgtgtgtgtgggtgtgttatggttacctggttataatagagtattaaagcagttatcttctgtattatcagatcacaaaggtggaatgttactattttatcagcaagatattaaaatgtatttctaaatcctccttggtttcaatcatgaataaacatttattattagcaatttaaaaaaaaaaaaaaaaaaaaaaa

SEQ ID NO: 3476 - DNA, 2739 bp, Rattus norvegicus
  Genbank Accession No. X86086
ggaattcccgtctatctgtctgccctgatccgaggcctccccagagcgtggtttctgctgcagaacctgagaccatggccaaaatagcacagggtgccatgtaccgaggctctgtccacgacttcgcagactttgatgcaaatcaggatgccgaggctttgtacacagccatgaagggcttcggcagtgacaaggagtccatattggagctgatcacctcccgcagcaacaagcagaggcaggagatctgccagagttacaagtccctctatggcaaggacctcatcgcagacttgaagtatgagttgacagggaagttcgagcgactgatagtgaacctgatgaggccgcttgcctattgtgacgccaaagagattaaagacgctatctcgggcattggcactgatgagaagtgcctcattgaaattttggcttcccggaccaatgagcagatacaccagctggtggccgcatacaaagatgcctatgagagagacctggagtctgacatcattggagacacttcaggccacttccagaagatgctggtggtactgctccagggaacccgggagaatgacgatgttgtgagtgaggacttggtccagcaggatgtccaggacctgtatgaggcaggggaattgaaatggggaacagatgaggcccagttcatctatatcttgggaaaccgtagcaaacagcacctacgattggtgtttgatgagtacctgaagaccacagggaagcccatcgaagccagtatcagaggggagctgtctggagactttgagaagctgatgttggccgtggtgaagtgcatccgaagtaccccggagtattttgctgaaaggctgttcaaagccatgaagggcctggggactcgagacaacactctgatccgtatcatggtctccaggagcgaactggatatgcttgacatccgggagatcttccggaccaagtatgagaagtcactctacagcatgatcaagaatgatacctctggtgaatacaagaaggctttgctgaagctatgtggaggggacgatgatgccgctggccagttcttcccggaggcagcacaggtggcctatcagatgtgggaacttagtgcagtgtcccgagtcgagctgaagggtaccgtgcgtgcggccaacgatttcaaccccgatgctgatgccaaaggcctgcggaaagccatgaagggaattggaaccgacgaagccaccatcatcgacatcatcacacagcgcagcaatgtccagcggcagcagatccggcagaccttcaaatctcactttggccgggatttaatggccgacctgaagtccgagatctcaggagacctggcaaggctgatcctggggctcatgatgccacctgcccattacgatgctaagcagctgaagaaagctatggagggagccggcacagatgaaaaggctcttatagaaatcctggccacccggaccaatgctgaaatccgagccatcaatgaggcctacaaggaggattatcacaagtccctggaggatgccctgagctcggacacatctggccacttcaaaaggatcctcatttctctggccacagggaatcgagaggaaggaggagaaaaccgggaccaggctcaggaagatgctcaggtggctgctgagatcttggaaatagcagacacacccagtggagacaaaacctccttggagactcgattcatgaccgtcctgtgcacccgtagctatccccacctgcgcagagtcttccaggagttcatcaagaaaaccaactatgacatagagcatgtcatcaagaaggagatgtctggggacgtcaaggacgcatttgtggccatcgttcagagtgtcaagaacaagcctctcttctttgctgacaaactgtacaagtccatgaagggtgccggcacggatgagaagaccctcaccagggtgatggtgtcccggagtgagatagacctgctcaacatccggagggaattcattgagaaatatgacaagtctccacaccaagccattgaaggtgacacctctggagacttcatgaaggctttgctggcgctctgtggtggagaagactaaaactcatggccttggagggtccccctgccatgcagtggccaaccgcaccagccaccgtgacctgaccaagccattgctccagcttcagagactaaggaagaagtgaggggtggagttggactgtgatccggctggggtgctctcttgccattgagggtcccaggcggtcccttctgttatccctcctgctcatggctaagtggctggtgaaccacagccatatatgcattcaaccctgctccccgtctgcctccttctccgcccaccctagcttccatccctccacacgaatccctgcctgatttaagctttgtcacatctctaaacacctccttggatggagccaccctgcccccagccctgaacagccgggggagggtagagagttcctcagagctggctcccagctgtgtccatcattggagtggcagcaggcaggtttcatacagtgctgtggactcgagaagccgttacactggactggaatggtggacagttgggtcacttactggaccccaatggagaaaagtgtgtcaccactcctcgccaagtctctgcttgtcttttccaataaattcggaaaagtggatcaagaataccttggcagggaataggggggcaaagtttagaacagagggaattc

SEQ ID NO: 3477 - DNA, 463 bp, Rattus norvegicus
  Genbank Accession No. X89696
catctgcaagcccttgcactacatgaccatcatgagccgacctgtgtgtatattcctagtgggtgctgctgtaatcttaggattcatccatggagcaatacaaactttatttatggcccagttacccttctgtggtcccaatatcatcaaccattttatgtgtgacttaataccactcctggagttggcctgcactgacacacacactctggggcccctgatcgctgccaacagtgggtcactgtgtttgcttactttctctatgctggttgtttcctatgtggtcatccctcgctccctgaggaatcacagttcagaagggcgtcgcaaagctctgtctacctgtgcctctcatgtcactgttgttgtcttattccttgtaccttgttcttacctgtacctaaggcccatgacctccttccccactaacaaagctgtaactgtgttttgcaccctagtgaca

SEQ ID NO: 3478 - DNA, 1505 bp, Rattus norvegicus
  Genbank Accession No. X89968
  misc_feature (1)..(1505): n = a or c or g or t
gtagcttggctgtgtcgggcctgaaccgagcagctgcgcgacgtcatggacacctccgggaagcaggctgaggctatggcgctgctggctgaagcggagcgcaaggtgaagaactcgcagtccttcttctccggcctctttggaggttcatccaaaatagaggaagcatgcgagatctatgccagagctgcgaacatgttcaagatggccaagaactggagcgctgctgggaacgctttctgccaggctgcccaactgcacctacagctccagagcaagcacgatgcagccacctgctttgtggacgccggcaacgctttcaagaaagctgacccccaagaggccattaactgtctgatgagagcaattgagatctatacagacatgggcagattcacaatcgcagccaagcaccacatctccattgctgagatctatgagacagaactggtggatgtagagaaggccattgcccactacgagcaatctgcagactactacaaaggagaagagtccaacagctcagccaacaagtgtctgctgaaggtggctggctacgccgcacagctggagcagtaccagaaggctatcgacatctatgagcaggtggggaccagcgccatggacagtcccctcctcaagtacagcgccaaagactacttcttcaaggcggccctttgccacttctgcatcgacatgctgaacgccaagcttgctgttcagaagtatgaggagctgttccctgccttctcggattcccgggaatgcaagctgatgaaaaagctgctggaagcccatgaggaacagaatgtggacagctacacagagtcggtgaaggaatatgactccatctccagactggaccagtggcttaccaccatgcttctacgaatcaagaagaccattcagggtgatgaggaagacctgcgctaggcctccagccactgccttccacccatctgtctgtcacagaggtggagccaacacctccaccaggagtctgaaggagtgggtncaatgtaggcctcatcctccagggcaccaggcaagctctcctggatggctggtcaccctatgcccactgcgtccttcaccccgccatttatttaagctcccaaaggtgtcctcctgctctggaaaacccacctggacagattctccaatacagacttctctgtgtgcttcaggaacctggagtcagcatccagtcccatctcctgaccagcagtgtactaaggctatttccatatctcctaccttgtaccctagcagagataagaacacaggtagttcgtgagacttgctctccctggctgggggtagcctctgcccctggagctttcccttgttcctacaatgccaacctctcaggttagacccagccctggagctcacagggtgccttggccctgccctgccctgcacctgcttctctcgctgcatccaggtctgtctgtcgacntgaagctgcggctggcccaagaaagacaannacctgccacnng

SEQ ID NO: 3479 - DNA, 1596 bp, Rattus norvegicus
  Genbank Accession No. X94185
aaaactgggcactttcattcagagagattcattgactctgagagtgatctggtgcagagggaccaccggcttggcttctgtcgccttccctaaccgctagcttcggcttgggaaaggccgaatcaaacccggctccgagagccgagcttctcacggcgtgcttggcctatgcctgcctcgaggggcgtctgctaggcaccccgccttctcctgcagctcgacccccatgatagatacgctcagacccgtgcccttcgcgtcggaaatggcgatcagcaagacggtggcgtggctcaacgagcagctggagctgggcaacgaacagctgctgctgatggactgccgaccgcaggagctttacgagtcgtcgcacatcgaatctgccatcaacgtggccatcccgggcatcatgctgcggcgtctgcagaagggcaacctgccggtgcgcgcgctattcacgcgctgcgaggaccgggaccgctttaccaggcgctgcggcaccgacaccgtggtgctctacgacgagaacagcagcgactggaatgagaacacaggtggagagtcggtcctcgggctgctgctcaagaaactcaaagacgagggctgccgggcgttctaccttgaaggtggcttcagtaagttccaggccgagttcgccctgcactgcgagaccaatctagacggctcgtgcagcagcagctccccgcccttgccagtgctgggactcgggggcctgaggatcagctccgactcttcctcggacattgagtctgaccttgaccgagaccccaatagtgcaacggactccgatggcagcccgctgtccaacagccagccttccttcccggtggagattttgcccttcctttacctgggctgtgccaaggactctactaacttggacgtgttggaagagtttggcatcaagtacatcttgaacgtcacccccaatctgcccaatctgtttgagaatgcaggggagttcaagtacaagcaaattcctatctctgatcactggagccaaaacctgtcccagtttttccctgaggccatttctttcatagatgaagcccgaggcaaaaactgtggtgtcctggtgcattgcttggcgggcatcagccgctccgtcacggtgacagtggcttaccttatgcagaagctcaacttgtccatgaacgatgcttatgacattgtcaaaatgaagaagtccaacatctctcccaacttcaacttcatgggccagctgcttgactttgaaaggaccctgggactcagcagcccctgtgacaatcgtgtccccgcacagcagctctacttcaccgcgccctccaaccagaatgtctaccaagtggactccctgcaatctacgtgaaaggcacccacctttcctagccgggagtgtctcattccttcagtttctcttgggcagcatcgaccaggctgctttctttgtgtgtggccccaggtgtcaaaaatgtcaccagctgtctgtattagacaaggttgccaagtgcaaaattggttattacggagggagagatttgctccattcattgttttttgggaaggacaggggtatgctgtctagatcccagg

SEQ ID NO: 3480 - DNA, 2492 bp, Rattus norvegicus
  Genbank Accession No. X94551
ccgggcaggtgacaaagccgtggagatctatgccagtgtggcccagctgacccctgtggactcggaggctctagagagtgaagcaaataaaatcaagaaagaagctgcagatctggaccgtctgattgaccagaagctaaaagattacgaggaccttagggaagacatgcgaggaaaggaacatgaagtaaagaaccttctagagaaggggaaagccgaacagcagaccgctgaccaactcctagctcgagccgacgctgccaaggctcttgctgaagaagctgctaaaaagggacgcaataccttacaagaagctaacgacattctcaacaacctgaaagattttgatagacgagtgaacgataacaagacagctgctggaagaagctctaagcgaattcccgccatcaaccggaccatagctgaagccaatgagaagacaagggaggcacagctggcgctgggcaatgcagcagctgacgccacggaggccaagaacaaagcccacgaggcggagaggattgccagtggcgtgcagaagaatgccaccagtaccaaggcggatgcggagagaaccttctcggaagagacagacctggataacgaggtgaatggcatgttgaggcagctagaggaagcggagaatgagctgaagaggaagcaagatgatgccgaccaggacatgatgatggcgggaatggcttcacaggctgctcaggaagctgaacttaatgccagaaaagccaaaaactctgtcagcagcctcctcagccaactgaccgacctcttggagcagctgggacagctggacaccgtggacctgaacaagctcaacgagatcgaaggctctctgaacaaagccaaagacgaaatgaaggtgagcgacctggacaggaaggtgtccaacctggagaacgaggcccggaagcaggaggcagccatcttggactatgaccgagacatagcagagatcataaaggacattcacaacctggaggacatcaagaagacactaccaacaggctgctttaacaccccgtccatcgagaaaccctagtggtgggagggctgtaaggcagtgtccctgacagggggccctgtgaggcctcggtgccttgacagcgaaaaaattacacttttcagaccccccccacttctctgctgctctctgtcactgtccttttgacccaagaaaagtcagagtttaaagagaagcaagttaaacatccttaaccaggaacaaagggttttgcctaataaagtgtctcctccacttctgtcagcaccctaccggaactttcccttgtttgcctgaagtcatagcatcttccagtggcatacccacatcacgtgagcctttgtatgccagggcagacccagccccctcccctctctcaagcaccatcagaacctatcttagtactccatttttctatgaaggagatgttcagctcctcacgtatgcactgagatggccaatatgtccagtcgcatcttctgcctcctcttgaagcaaaggaaataaacatcctgtgccaaaggtattggtcattagacgttggtagccatccatcagacatgctggctgtttgagcataggccactgagccattacgggtaacagtgtagttacgtgtgggtctctgagagagcatggctcaaagatgcttacatttttctcctgtgctaattgactaggaagataaacgtttcccaatcctcagccgcctgatagagagtctggatgggcagcttgcacataccactacactaggtagcttttgatagttttataagcaggactcagtgcagaagaaacagagatgtgataaccactcacgttttttttcccccaaatcttactaattcttggagcttcgttagtgtgttagaattggaacttattgttagcatatctatcaaaacagtcgtcctctaaggtcttgaccaatgaaagaaaagcaaatctcctttccacccattttctgggaagtggatgtaaccggtatgattaggattccataagtgaatttctctttctctgttggagagagatgtgacatttggcccttagctccaagtctcttctgacatttacattctttcaaaacacatcattgttggccagatcctggtggcaaacgctgctctcagtgtttctcaaggccgtggaccccatctagttcctgcgctttgtcgtccgcccactctaagcctttcctctgtgtggggagggaagaaccatgcatggcgtttcctagtgggcttctcgacctctgatcctcagctctgtggttcccttaagaccacaccgggacagttccctgccacacgcccccttcctcctatctacctgcctctgagattcgtatttagcctttaacactatgcaattttgtactttgcgtagcggggggggaaagaaactattatctgacacactggtgctattaattatttgaaatttatatttttttgtgtgaatggatttt

SEQ ID NO: 3481 - DNA, 2222 bp, Rattus norvegicus
  Genbank Accession No. X95096
cagcttaggagaatggggtggctcccactactgctgcttctggcacagtgttcaagggctcttgggcagcgctcaccgctgaatgacttccagctgcttcggggcacagagttaaggaacctgctacatccagtggtgccagggccatggcaggaggatgtggcagatgccgaggagtgtgctagacgctgtgggccccttctggactgccgagccttccactacaatatgagcagccatggttgccagctactaccgtggactcagcactctctgcgtgcacagctacaccattctagcctgtgcgatctcttccagaagaaagactatgtacggacctgcattatggacaatggggccagctaccggggcactgtggccaggacagctgatggcttgccctgccaagcctggagccgcaggttccccaatgaccacaagtacacgcccacaccgaagaatggcctggaagagaacttctgtcggaaccctgatggggaccccagaggtccctggtgctacacgacaaaccgcagcgtgcgtttccagagctgcggcatcaaatcatgcagggaggcggtttgtgtttggtgcaacggcgaggattaccgtggcgaggtagacgttacagaatcgggacgggagtgtcaacgctgggacctgcagcacccacactcgcaccctttccaccctgaaaagttcccagacaaagctctgaaagacaactattgccgtaatccggatgcatctgagcgcccctggtgctacaccacggacccgaatgttgagcgagagttctgtgacctgcccagttgcgggcccaacctgccaccgaccaccaaaggatccaagtcacaacagcgcaacaaggtcaaggcttcgaactgcttccgcggaaaaggtgaagactatcgaggcacaaccaataccacctctgcgggtgtgccctgccagcgctgggatgcgcagaatccgcaccagcaccgctttgtgccggagaaatatgcttgcaaggaccttcgtgagaatttctgccggaatcctgatggctccgaggcgccttggtgcttcacatctcgacctggtttgcgtgtggccttttgctaccagatcccacgctgcacagaagaagtggtgccagagggctgctaccatggctcaggtgaacagtatcgtggctcagtcagcaagacacgcaagggcgttcagtgccagcactggtcctcagagacaccacataagccacaattcacacccacctcagcaccacatgcaggcttggaggcaaacttttgccggaatccggatggagatagccatgggccctggtgttatactttggacccagagaccctgtttgactactgtgccctaaaacgctgtgatgatgaccagccaccatccatcttggaccccccagtccaggtgcagtttgaaaagtgtggcaagagagttgaccagagtaatagacttcgtgtggtggggggtcatcctgggaactcaccgtggacagtcagcttgcggaatcgacagggccagcatttctgtgggggttccctagtgaaggagcagtgggtactgaccgcccggcaatgcatctggtcatgccatgatcctctcacaggatatgaggtatggttgggtacaattaaccagaacccacagcctggagaagcaaacctgcagagggtctcagtggccaagacagtgtgcggacctgcaggctcccaacttgttctgctcaagctggagagacctgtgatcctgaaccatcacgtggccaggatttgcctacctcctgaacagtatgtggtacctccagggaccaactgcgagatcgctggctggggtgaatccaaaggtacaagcaatagcacagtccttcatgtggccaaaatgaaggtcatctccagtcaggaatgtaatgtgaagtaccggagacgagtacaagagagtgagatatgcaccgaggggttgctggcccctacgggcgcttgtgagggtgactacgggggcccacttgcctgctatacccatgactgctgggtcctacagggacttatcatcccgaacagagtgtgtgcacggcctcgctggccagctatcttcacacgtgtgtctgtgtttgtggactggattaacaaggtcgtgcagctggagtaggcctgctttcgatctcttagagatgacaaggctgcttatcaaactaaagcaaacttttc

SEQ ID NO: 3482 - DNA, 1966 bp, Rattus norvegicus
  Genbank Accession No. X95577
agttgctaaggggtagagggagttgcccgaggagtgtcaggttacgctcccgctcttgtcggagttccagccgctgcgtccaagcagacacttcgccatgggcaatacgagcagcgagcgcgccgcgctggagcggcaggctggccataagacgccgcggagggacagctcggggggcaccaaggatggggacaggcccaagatcctgatggacagccccgaagacgccgacatcttccacaccgaggaaatgaaggctccagagaaggaggagtttctggcgtggcagcacgacctcgaggtgaatgagaaagcccccgcccaggctcggcccaccgtatttcgatggacagggggtggaaaggaggtctacttgtctggatccttcaacaactggagcaaattgcccctcactagaagccaaaacaacttcgtagccatcctggacctgccggaaggagagcatcagtacaagttctttgtggatggccagtggacccacgatccttccgagccaatagtaaccagccagcttggcacagttaacaacatcattcaagtgaagaaaactgactttgaagtatttgatgctttaatggtggattcccaaaagtgctccgatgtatctgagctgtccagttcccccccaggaccctaccaccaggagccttacatctctaaaccagaggagcggttcaaggccccgcccatcctcccgcctcacctgctgcaggtcatcttgaacaaggacacgggcatctcttgtgatccagcgctgcttccggagcccaaccacgtcatgctgaaccacctctatgcactctctatcaaggatggagtgatggtgctcagtgcgacccatcggtacaagaaaaagtacgtcaccaccctcctctacaagcccatatgagaggatgagccagccgtgggccacggacagcaggcgggcggcgtgggctctccgtgtgcatgcgcatcctcactccgggacatctcacccccacatagtcctccttgaaggtctgtccaggtctgtccaggcacagccagaaatcggatggacggcagcccatggccagcaccgcagcagttgcgccaggctctagtgctctaagcatcatccctctgctggcccgagatgtctacagccagacctgaatgctggtcctgctagaaaacctagacagaactgaatcaccaaaccctcatcatccctctgaacctgctttggaagaaacgagcgctcggtcttgcctgtccttccgaatcacagccgtagattgtagactccatggaatttcagtgtccaatttccagatgccatgtcgcaatcgattcctgacactgtgcactgagaccttcttaaccagagtggctggctgtccactctcacttaaggcaataagtcaccagacgagactataggtcatgtgactactgagcaataatcgttctcaaacagacatcagaaaccactgccatttctccatcaagccagacgatcctgaggactgaccaccatgggaggttgtccaccttatttcagttgcagtgttggccatgttaccgtgacaacctggtcgaatcccgccctctttttagttctagcacgtgctactcagctgggggccgtgtctccagtgagcgaagagagtgtcacggtggttactattgcctgatctaagagagcttggcacctgcggcagactgctaggttccagcagggttggcacgagtgaacctatcgtgtgctcagtgtgatttccacagtgatgtcacagacgtgcccattggtacaggctcctgtcacctgtcagcataggtaggcacaagctctgtggtgtccgctatttggttaaacctgagttttgggtaccttttgttactgttttcaaaacacggacttgctgtcacgttgatgtacaagtttcaataaagctttgtaaaataaaaaaaaaaaaaaaaa

SEQ ID NO: 3483 - DNA, 463 bp, Rattus norvegicus
  Genbank Accession No. X95850
tttaggcataaaggggtatgttaatccattgccacatacaattcctataattacatatagggagtgaactgtgaaccagttagaaacctgtatctagttgccaacgagtgccactggagaaaagaaactccacaagttgaagaactgagaaattagcttccttccagtgtgacgcggtacacggaggtgctctcgagcgagtgagcttcctcctttcgcaaacgctaatgcagtagtagcaatcaatcttgtcctctcttgtaaacatctgctggtggtccagagctctgagccagtcatgctgctgtctaggttctaacagctgtttgtggactcagttaccattgcaagtggacaccttacccgactagaaataaacattttccctgctctcctgatgccccgttccttctttctgcaaacacatcttaggagtaagactttaaacctttgatctcccaca

SEQ ID NO: 3484 - DNA, 557 bp, Rattus norvegicus
  Genbank Accession No. X97374
gcaggacccaggccactgactccctctacaaactcttccttcccaggtgaacctcagacctgggaatcacctcagggaggaatggtgcttggccctttgtgttgtggtccccacagctgactaaccctctccccagaccgtactgactggcatgtgccccttatgtgtttcagcctcttgcttcccacggctgcaccatgaaaatcctgttttgtgatgtcctgctgctcagcctgctctccagcgtgttcagcagctgtcccgaggactgcctcacctgccaggagaggctccacccggctccgggcagcttcaacctgaaggtaggtccaggaggtggagggactgccctcttccctgacatctcttccctctgactccaaggcaaaccctacgaggtcctctggcttaagcagtatcatctgaccaagaggaaacaggtggatctgagctacatcttcctaccatgaccctgtggtcctccctctttattaccagattccagagatcctccctctctgccaccagactcctctggttctccctctctatctccc

SEQ ID NO: 3485 - DNA, 706 bp, Rattus norvegicus
  Genbank Accession No. X97443
gccttgctctttctgttccttctcggccccagctcggtcctcggcatctccttccatctacccgtgaactctcgcaagtgtctccgcgaggagatccacaaagacttgctggttacgggcgcgtacgagatcaccgaccagtctgggggcgctggcggcctgcgcacccacctcaagatcacagattctgctggccatattctgtatgccaaagaggatgcaactaaagggaagtttgcctttaccacagaagactatgacatgtttgaagtatgctttgagagcaagggaacagggcggatacctgaccaactagtgattctagacatgaagcatggagtagaggcgaaaaattatgaagagatcgcaaaagttgagaaactcaaaccactggaggtggagctacggcgcctcgaggacctttcagagtctattgttaacgactttgcctacatgaagaagcgggaagaggagatgagggacaccaacgagtccacaaacacccgcgtcctgtacttcagcatcttttccatgttctgcctcattggactagccacctggcaggtcttctacctgcgtcgcttcttcaaggccaagaagttgatagagtaatgaggctcagtcttctgtcccctggagccagcagaacatcgctgggacgttgcctggcctagcccaaggccaagttactacgtatatcaaggcg

SEQ ID NO: 3486 - DNA, 1780 bp, Rattus norvegicus
  Genbank Accession No. X97772
gccttcagtttcctgtactaagtgcttctgcccaccagagcaaccgattctaaggcctggctctagcaatggccttcgcaaatctgcgcaaaatactcatcagtgatagcctcgacccctgctgccggaagatcctgcaagatggagggctgcaggtggtggagaagcagaacttgagcaaggaggagctgatagccgaactccaggactgtgaaggccttatcgtccggtcagctactaaggtcactgctgatgtcatcaatgcagcagagaagctccaggtggtgggcagggctggtacaggcgtggacaatgtggatctggaggctgccacaaggaagggcgtcctcgtcatgaacacccccaatggaaatagcctcagtgctgcggaactcacctgtgggatgctcatgtgcctggccaggcagatcccccaggcgacggcttcgatgaaagatggcaaatgggaccggaagaagttcatggggacagagctgaacgggaagacactgggaattcttggcctgggcagaattggaagagaggtggccgcccgaatgcaggcctttggaatgaagactgtaggctatgaccccatcatttctccagaagtcgctgcctcctttggtgttcagcagctgccgctagaggagatctggcctctctgtgatttcatcactgtccataccccgctcctgccctccactacaggcttgctcaatgacagcacctttgcccagtgcaagaaaggcgtgcgggtggtgaactgtgctcgaggaggcattgtggatgaaggtgccctgctccgtgccctgcagtctggtcagtgtgctggtgctgcactggatgtgtttacagaagagccaccacgggaccgggccttagtggaccacgagaacgtcatcagctgtccccacctgggcgccagcaccaaggaggcccagagccgctgtggggaggaaatcgcagtccagtttgtggacatggtgaaggggaaatctctaacaggggttgtaaacgcccaggctcttaccagtgccttctctccacacaccaagccttggattggtctggcagaagcattgggcacgctgatgcacgcctgggctggctcccctaaagggaccatccaggtggtgacacaaggaacatctctgaagaatgctgggacctgcctgagccctgcggtcattgtcggccttctgagagaagcatcaaaacaggcagatgtgaacttggtgaacgctaagctactggtgaaagaggctggcctcaatgtcaccacctcccacagtcctggtgtcccaggagagcagggcatcggggaatgcctcctgactgtggccttggcaggtgccccctaccaagctgtgggcttggtccagggcaccacaccaatgttgcagatgctcaacggagctgtcttcaggccagaggtgcctctacgcaggggccagcccctgctcctgttccgggctcagccctccgaccctgtcatgctgcccactatgatcggcctactggcagaggcgggggtacagctgctgtcctaccagacctccaaggtgtctgacggagacacttggcacgtcatgggcctctcctccctactgcccagcctggacgcatggaagcagcatgtttctgaggctttccagttctgcttctgacccaggggctcagcggtcccagcccctcaggctcttctgaggaaacccgctcactgtgacctgaactaatatctagtaaagaatctaactccaaaaaaaaaaaaaaaaaa

SEQ ID NO: 3487 - DNA, 516 bp, Rattus norvegicus
  Genbank Accession No. X98225
tgctttgctgaccagaacccatattaactatggagtcaaaggggatgtggcagttattcggattaactcgcccaattcaaaggtaaatacattgaataaagaagtacaatcagagttcgtagaagtaatgaacgaaatctgggccaacgaccaaatcaggagcgccgtccttatttcgtcaaagcctggctgctttgttgcaggtgctgacatcaacatgctggcctcttgtacaacgccccaagaagcagcacgaatatcacaagaaggacagaaaatgtttgagacacttgaaaagtcaccaaagcctgttgttgccgccatcagtggatcctgcttgggaggcggacttgagcttgccatagcatgtcaatacagaatagcaacaaaagacagaaaaacagtattaggtgtccctgaagtgttgctgggaatcttaccaggagccggaggtacccagaggctgcccaaaatggtgggtgtgcctgctgtttttgacatgatgctgactggtag

SEQ ID NO: 3488 - DNA, 1412 bp, Rattus norvegicus
  Genbank Accession No. X98399
ggtgcctcttctgcaccactctccagggcactgcacctcttaagagagcctggctgccctttatcagacactgccttctgccaccgggaagcccgctggagggagccagaggaagaaatggccatggaagatattcccactatggttaaagtagaccgaggtgaaagccagattttatcctgccgggggagaaggtgtggcctcaaagtacttggctatgtcacgggagatatgaaggaattcgccaactggcttaaagacaagcctgtggtgctccagttcatggactggatacttcgtggcatatcccaggtggtgtttgtcagcaaccccatcagtggaatcctgattctggcgggacttctggtccagaacccctggtgggcgctctgtggctgtgtaggaaccgtggtctccactctgaccgccctcttgcttagccaagacagatcagcgataacggccgggctccagggttacaatgccaccctggtgggaatactcatggctgtcttctcagacaagggcgactacttctggtggttgatattccctgtatctgctatgtctatgacttgcccggttttctcgagcgcgttgagctccctgttcagcaagtgggacctgcccgtcttcactcttcctttcaacatggctttgtcgctgtaccttccagccacaggacactacaatacgtttttcccaagtaaactcttcatgcctgtcagctccgtgcccaacatcacgtggtccgagctcagcgccctggagctgttgaagtctcttccggtgggagtcggtcagatatatggctgtgataacccgtggacaggggccattttcctgtgtgccatcctgctttcctccccactcatgtgcctgcacgctgctatcggatcgttgctgggagtcatcgcaggtctcagtcttgcagctccgtttaaagatatcttctctgggctctggggtttcaacagttccctggcttgcattgcgatcggagggatgttcatggcactcacctggcagacccatctcctggcccttgcctgtgccctgttcactgcctactttggagcctgtatgacacacctgatggctgcggttcacctgccagcttgtacctggtccttctgcttggccacactactctttctcctgctgaccacggaaaatcccaatatctacaggatgcccctcagcaaagttacctactccgaggagaaccgcatcttctacctacaaaacaagaaaagggtggtcgactctgtgtgtgtacatgtctgtgtgtgtggctgtatgtgtatcttgcctgtgtgtgtgcttctgcatgtgtatctatgtgtctctgtgtcttcgtgagtttgtgtgtatatgtgtctctgtatttctgtgggtgtgtgtgtgtgccg

SEQ ID NO: 3489 - DNA, 2031 bp, Rattus norvegicus
  Genbank Accession No. X99337
  misc_feature (1)..(2031): n = a or c or g or t
gatgcttggcnaagtcctcatctccctcatccccacaggctcagacgcaaaggagaaggagcatggaagagtagaacctgaagacacaatccctaaatgcggggagtctgcccttccgttccacctcagtgggaaggactgttttccctttgtgagcctgcccattcgctgctcgctctccggctagggaggatgtcgggctcgtcgctccccggcgccctggccctctcgctcttgctggtctctggctcgctcctcccagggccaggcgctgctcagaacgaaccaagaattgtcaccagcgaagaggtcattattcgagacagcctccttcctgtcaccctgcagtgtaacctcacttccagctctcacacccttatgtacagctactggacaaagaatggggtagaactcactgccacccgtaagaatgccagcaacatggaatacaggatcaataagccaagagctgaggattcaggcgaataccactgtgtatatcattttgtcagcgctcctaaagcaaatgccaccattgaagtgaaagctgctcctgacatcactggccataaacgcagtgaaaacaaaaatgaagggcaggatgctatgatgtattgcaagtctgttggctacccccacccggaatggatgtggcgcaagaaggagaatggtgtgtttgaggagatttccaatagctctggtcgcttcttcatcatcaacaaggagaattacactgaattgaatattgtgaatctccaaatcacagaagatcctggagagtatgaatgtaatgccaccaactccattggctctgcctccgtttccacagtcctcagggtacggagccaccttgccccactttggcctttcttgggaattctggctgaaatcatcatccttgtggtgatcattgttgtgtatgagaagaggaagaggccagatgaggttcctgatgatgatgaaccagccgggccaatgaaaaccaactctaccaacaatcacaaagataaaaacttgcgccagagaaacacaaattaagtactgcttttaatctctttaggttcctgaaaaatgatggcaacatgacctgctaagttttctgcttggacctctttggtctctccctttcaagtgagcaacaccacaatgaccgtctaaagcatgccttatttagcctctcctataagggtgacctagccaggtacattttaaacaatgcttcagtgtagaaggtgtaaactattttggggcttgatgtgctgtgaatgttgctttccctccctttgttaaaatatttaaatagaagcgaaaggtcctttgaggatcagatcatgcatgcgccatttttttacttatacagctgttaaattggcaaagctctaaatgcactgctgccatctagtgatcattttgnaaagtacagcaaaacctacagatatatacagtatataaatatatatatattcatatcncngggggtgggagaaatccaaaataaagtcaaagcttgtttcatttttaagctgctgatactcattccttattatttgttgtcagatgaggaagctgcagttctggtacaaaaagatgagagtataaacttaagtctgtcattctaagggcttacttaccctataactttaagaacctggaacagtccactgaacggctagaatgaattgcagtatatatgtatgattgctttttaagtgactatttttccttttgtcaaatcatgtaaattctgaaatcttttgcactgatgtgtcgaaccttattcttgtatattcaatcaaggcaacttttataatttcccatttgttttcaatgaccctgaaatgttaatagcatggtgatattctatgcaactctagttataccttttggtttgacactgtattttcacattgatttcatgactgatgatagattttataacctgactgggttctcatgcggtactaactgtagatgcatgtacttgtgttctgtgtaattattgaagtgcaatggtgtacaaaaaaagtgaat

SEQ ID NO: 3490 - DNA, 1169 bp, Rattus norvegicus
  Genbank Accession No. Y00350
cgaacggcttgggactccagaatttcccggagctgaagaatgacacgttcttgagagcagcctggggagaggaaacagactatactcctgtttggtgcatgagacaagcaggccgctacttaccagagtttagggaaaccagggctgcccaggacttcttcagcacctgtcgatctcctgaggcttgctgtgaactgactctggagccagtgcggaggtttcctttggatgctgctataattttctctgacatccttgttgtaccccaggcattggctatggaggtgaccatggtacctggcaaaggacccagctttccagagccattaagagaagagcgggacttagagcgtctacgggatccagcagcagtggcttcagagttaggctatgtgttccaagccatcacccttacccgacaacagctggctggacgtgtgccactgattggctttgctggtgctccgtggaccctgatgacgtacatggttgaaggcggcagtttcaagaccatggctcaggccaagcgatggctctatcagaagccagtggccagtcacaagctgcttggcatactcactcatgctctggtcccatatctaataggacaagtagctgctggtgctcaggcattacagctctttgagtcccacgcaggacatcttggctccgagctcttcagcaagtttgcactgccttacatccgtgatgtggccaagcgagtgaaggctgggttgcagaaggcgggcctgaccaggatgcccatgatcatctttgccaaggatggacattttgccctggaagagctggcccaggctggctatgaggtagttggacttgactggacagtggctccaaagaaagcccgggaacctgttggaaagacagtgactctgcagggggaactggatccctgtgccctgtatgcatctgaggaagagattggtcgactggtgcagcagatgctgaatgactttgggccacagcgctacattgctaacctagggcatgggctttaccctgacatggacccagaacacgtaggagcctttttggatgcagtacacaaacactcacgcctgcttcgacagaattgagtatgtgcttttctgctcaagtaccaccgacacagattgtttccaggagaataaaacttccagaaacttcca

SEQ ID NO: 3491 - DNA, 1438 bp, Rattus norvegicus
  Genbank Accession No. Y00497
gcgcctcagcaatgttgtgtcgggcggcgtgcagcgcgggcagaagactgggccccgcggccagtaccgcgggctcccggcacaagcacagcctccctgacctgccttacgactatggcgcgctggagccgcacattaacgcgcagatcatgcagctgcaccacagcaagcaccacgcgacctacgtgaacaatctgaacgtcaccgaggagaagtaccacgaggcgctggccaagggagatgttacaactcaggttgctcttcagcctgcactgaagttcaatggcgggggccatatcaatcacagcattttctggacaaacctgagccctaagggtggtggagaacccaaaggagagttgctggaggctatcaagcgtgactttgggtcttttgagaagtttaaggagaaactgacagctgtgtctgtgggagtccaaggttcaggctggggctggcttggcttcaataaggagcaaggtcgcttacagattgccgcctgctctaatcacgacccactgcaaggaaccacaggccttattccactgctggggattgatgtgtgggagcacgcttactatcttcagtataaaaacgtcagacctgactatctgaaagccatttggaatgtaatcaactgggagaatgttagccaaagatacatagtttgcaagaagtgaagcccttccgccaggctgtgtgtcaggcccgtggtgggtgttttgtagtagtgtagagcattgcagcactgtggctgagctgttgtaatcttcattgatgcctatccacatatgtgtaagcatacagttatgataatttcttaattaaatgtattgttaggcaactgtttgagaacagtacatacttggtgtgagctgctcttgattgaacattttcattagaggcttgaattgcttggacgctgtcactgtcatcataaggccatcaaagatattccatctctgtgttggggcctgtggggaggctgtaatcctgttctactgcagttaggaaaaaaatgagttaccccccccccccagaattgttgaataataaaatagagaactgaatagttctcttttgtgttaaaaattgctatttttcataagtaatcctttgtttagcggatatcacctagtggtctttatttatggccacagtttcacagaaacatcattttttcacttgaaacgtgtaactaggctaaggatggatggagtggtagagcctttgcctgtcttatgtgaggccctgggctctacctcactactgaacaaatcaacagacccaagctaggctcctgactgacaactgttaattcggagaggagtgacattgtgcctctgggtttttttataggctgagatgcaaaaactgttaccttgtctattaaaaccgactgtgtattgtatgaaagtgctcaagatggacaaagtat

SEQ ID NO: 3492 - DNA, 945 bp, Rattus norvegicus
  Genbank Accession No. Y07557
atgacagaaaggaaccaaactgtcatctcccagttccttctcctgggcctgcccattcccccagagcaccagcacgtgttctacgccctgttcctgtccatgtacctcaccactgttctagggaacctcatcatcatcatcctcattctactggattcccatctccacacacccatgtacttgtttctcagcaacttgtccttctctgacctctgcttttcctctgttacgatgcccaagttgttgcagaacatgcagagccaagttccatccatcccctatgcaggctgcctgtcacaaatatacttctttctgttttttggagacctcgggaacttcctgcttgtggccatggcctatgaccgctatgtggccatctgcttcccccttcattacatgagcatcatgagccccaagctctgtgtgagtctggtggtgctgtcctgggtgctgactaccttccatgccatgctgcacaccctgctcatggccagattgtcattctgtgaggacaatgtgatcccccactttttctgtgacatgtctgctctgctgaagctggcctgctctgacacccgtgttaatgaggttgtgatatttattgtggtcagcctctttcttgtccttccatttgccctcattatcatgtcctatgtaagaattgtgtcttccattctcaaggtcccttcttctcaaggtatctacaaagccttttccacatgtggatctcacctgtctgtagtgtcactgttctatgggacagtcattggtctctatttatgtccttccagtaataattctactgtgaaggagactgtcatgtctttgatgtacacagtggtgactcccatgctgaacccctttatctacagcctgaggaatagagatataaagggagcaatggaaagaatcttttgcaaaagaaaaattcaactaaacctataa

SEQ ID NO: 3493 - DNA, 3628 bp, Rattus norvegicus
  Genbank Accession No. Y07704
tggggatgctagtgcctactgcgctggctgctcggctgctgagcctgttccagcaacagctgggttccctctggagtggcctggccatgctgttctgctggctgagaatagcattggggtggccagatcctggaaagggacagccacgggtccggggtgagcccaaggagactcaggagacccacgaagatccaggcagtgctcagcccacaacccccgttagtgtcaactaccacttcacgcgtcagtgcaactacaaatgtggcttctgcttccacacggccaagacatccttcgtgctgcccctggaggaggccaagcgaggactgcttctgctcaaacaggctggtatggagaagatcaacttttcaggaggagaacccttcctacaggacaggggtgaatacttgggcaagctcgtgagattctgcaaggaggagctagccctgccctctgtgagcatagtgagcaatggcagccttatccgagagagatggttcaaggactatggagactatttggacattcttgctatctcctgtgacagctttgatgagcaggttaatgttctcattggtcgtggccaagggaaaaagaaccatgtggaaaaccttcaaaagctgcggaagtggtgcagggattacaaggtggctttcaagatcaattccgtcattaatcgcttcaacgtggacgaagatatgaatgagcacatcaaggcgctgagccctgtccgctggaaggttttccaatgcctcctgattgagggtgagaactcaggagaagatgccctgagggaagcagaaagatttcttataagcaatgaagaatttgaagcattcttacagcgtcacaaagatgtgtcctgcttggtgcctgaatctaaccagaagatgaaagactcctaccttatcctggatgaatatatgcgctttttgaactgtaccggtggccggaaggacccttccaggtccatcctggatgttggcgtggaggaagcgatcaaattcagtgggtttgatgagaagatgtttctgaagcgcggggggaagtatgtatggagtaaggctgacctgaagctagactggtgaggtgagattggacggagactctaaccagctacgaggagtccacgagcagccgctcgccaccacgcacatctggctgtctacggactgttgctactgagaatgcactctatgttctttctttcagtttgactgaactaagaaaggagtaaaaccattctgtgaacccttatacagccgataagggtcctccacaggggaaggagttcagttcacagaggaacaaggtccagcgatctcaaagaactcacattttatttgtattcgaatttttgtatggatcgttactgtgaatcccatgtttccttttccctttctgttcccccatgagaaactgggttattttctgctaactatgccagttttgtcaacaggaaggatcacaaaacacaccctgcgattactgctgactgttctaatgcttttctgctttggaatctcggactttttgctcagaaatatagaatcaagaagtgtgttatagagccgtacgtgagaaccttactcttttgcaaggagcatatggaaggaggtacttctgaggacggtgtgttcatggcctcagcctctgctgctgctgctgcttcaaggatggctgttctatatcgtaccaattccttcaaggttctggacaaagccaaggtacactttacctttcatggcatggccgtgaagatggcactgacagccgcaaccaccccagcactgaggctgcctgagtctgtcaggctaaaaggttgtcccacttttctgaaaagctacaagggctcttctgcacatccagcagaatcatgacaggatgggcatggaggactcttcaggagtatgaaatgtggctgctgctccttaccatatttctcatgaaactctgaaataagacctagtagtctaggtcaccatgagaaaataatttcttctctacatcaaataagcaaaagagagaacatgaactagcccaaatcttcttcctgtggaagcattgcatgagtttattcaacctagacagcctcactgcttggaaaataattccctggaaattaaataaataccatggaaaagaaattaaactcctctgcaatcccactgtggccactagagggcaccaggaagtcagacttcattgtctcagagacttttcttcagtctttttttagaatttggtgaattttaattctgttccttatctgttttgtctttgttttttgttttggtgcctattactaaaattaatactaaacattttccaaggaactggaattttggccatttacaaaaggtcttcattctttagtgaggtcactataattcaactaagacatactctgtctcattaaaaataggtcaggttttcctgtgttttctgtcttgtttggttgtgtgtgtgtgtttacctatttttgcttgaatatagatataactatgtatcccaggctagcctggaactcatgatacctctgccttaacctccccctcttaagtgcccaggaattacccaactcctgtacagagatttttaagagaagtttgagtcacattcccccctgcagattgtgatttttttttttaagttaagtcctgtgtacatagttcacatgggaaaccatgacatcccagaggacatgggcagacacccacttggtcacacgacagagggaagctgcatgtttctttccctaattaaagtagagcatgaagaaagtatgattggaaagtgagccatcatttacatgtacccccaaccccttgtgcatgcactggcggtgggagatctctgtgcttaaaatattgaaaagtcccctttccttaaagggaaaaattacgatattttactatcgtagtacaaatcaaacttggattagatcatacattggtttgctttttcagtgttaaatktgggtgttcattttgtaaagcatacgctccctgctggggaaacaaggagtgatctagttgacatttgttaagtgtgaccagcagataccttgtgtcccatgattgatttatgcagagcagtaatactgggaagggggatttacttaagaacatcgacgggtaggacatccaacactgatttcaaagttttggcttctttattataatgtgttcggcggtaaaaaaaagtcatgggttgttttctttgaagctgaaagtctcatggtgttatttacctaaattatctgaaaaatttaaaaggggcccaggtttcattctgcgttggagtttgggggtctaattgttgcataaataaacaggcaaccaatcatcagaggttgactcctcccatcaataattcagctcgtgttttacccttttgatggactgatgttgtttcataagctattagtagtccaagaacaatcatgcaggcctcatgtgaatgtgttcagatgaggtttgatgttcgggatacatgtgcatgtatctccctgtagaatgacactgtattttgaggcattgctctagtgtatggaaacgtgatctgtgtattaaaatgttttatgcatgacctcaaaaaaaaaaaaaaaaaaaaaaaaaaaaaaaga

SEQ ID NO: 3494 - DNA, 1346 bp, Rattus norvegicus
  Genbank Accession No. Y09332
gtcgcagccaagatgtccggtcccaccaccgacacgccggccgccatccagatctgccggatcatgcgtccggatgatgccaacgtggccggcaatgttcacggagggaccattctaaagatgatcgaggaggctggggtcatcatcagcacccggcactgtaacagccagaatggggagcgctgtgtggctgccctggcccgggtggagcgcactgacttcctgtcgcccatgtgcatcggtgaggtggctcacgtcagcgcagagatcacctatacttccaagcactctgtggaggtccaggtccacgtgttgtcggagaacatcctcacaggtaccaaaaagctgaccaataaggccaccttgtggtatgtgcccctgtcattgaagaatgtggacaaggtccttgaggtgcctcctattgtgtatttacggcaggaacaggaggaggagggtcggaaacgctatgaagcccagaagctagaacgcatggagaccaagtggaggaacggagacattgtccagcccatcctgaacccagagccgaacacagtgagctacagccagtccagcctgatccacctggtggggccctcagactgcactcttcatggcttcgtgcacggaggtgtcaccatgaagctcatggatgaggtggccgggattgtggctgcgcgccactgcaagaccaatatagtgactgcctctgtggatgctattaatttccatgacaagatccggaaaggctgtgtcatcaccatctctggacgcatgaccttcacaagcaataagtctatggaaattgaggtcctggtggacgctgaccctgtggtggacaactcacagaagcgctaccgggctgccagtgccttcttcacctacgtgtccctgaatcaggagggcaagccgctgcctgtgcctcagcttgtgccggagacggaggacgagaagaagcgttttgaagaaggcaaaggccgctatctgcagatgaaggcgaagcgacagggccatacagagcctcagccctagatgtcttcctccctcccatcctgtcccgtcctgggtcagcacagttgtggcagtagtcccgtgtgcagtcacttagaagtcgcccccttggccaaaccccgatttcctttgagagctggtgttgtgaagtaccgtgtggcagtgttacctgtggcctgttcccaaaacctgtgcaccaaagctttatttatatccctccagtccctgctcccatgttgtcccaaaggccatcgtggacaccagagcacactgactggcctggagaagccagcaccactaataaagctgctgtctggctggaaaaaaaaaaaaaaaaa

SEQ ID NO: 3495 - DNA, 1711 bp, Rattus norvegicus
  Genbank Accession No. Y09333
cgggcctacggctcagtctaaggactgcaaataggcagctggccactagaggatctctaacttttcctacgaaactgagggctgaagtcaaagatacaaaatggtggcctcgtctttcgctgtcctgagagcaagcaggttgtgccaatggggttggaagagctggacgcagctgtcaggtcctccgccgctcagcaccggtggccggaccacttttgcgcggacaaatgctacgctgagcctggagcccgggagccgcagctgctgggacgagccgttgagcatcaccgtgcgcggcctggcccccgagcagcccgtcacgctgcgcgcggccctgcgtgacgagaagggcgcgctcttccgagcccacgcgcgctaccgcgccgacgccggtggtgagctggacctggcgcgcgctcccgcgctgggcggcagcttcacggggctcgagcccatggggctgatctgggccatggagcccgaacggcctctctggcgcctggtcaagcgcgacgtgcagaagccttatgtggtggagctggaggtgctggacggacacgagcccgacggcggtcagcggctggcacaggcagtgcacgagcgtcacttcatggctccaggggtgcggcgcgtgcccgtgcgcgacgggcgggtgcgcgccacgctcttcctgcccccagaacctgggccctttcctgaaatcatagacctttttggagttggaggcggccttctggagtaccgggcgagtctgctggctgggaagggttttgccgtcatggctctggcttattacaactacgacgacctccccaagaccatggaaaccatgcgcattgagtactttgaagaagccgtgaactacctgcgtggccaccctgaggtaaaaggaccaggaattgggctgcttgggatttccaaagggggtgaacttggccttgctatggcctccttcctgaagggcatcacggctgctgttgtcatcaatggctccgtggctgctgttgggaacaccgtatgctacaaggatgagactataccccctgtgtcccttctgagagacaaagtcaaaatgaccaaagatggtctcttggatgtcgtggaagctctgcaaagccctttggtagacaagaagagcttcatccctgtggaaaggtctgacacgaccttcctgttcctcgttggtcaggatgaccacaactggaagagcgagttctatgccagagaggcctccaaacgcttgcaggcccacgggaaagagaagccccagatcatctgctacccagaagcagggcactatatcgagcctccttacttcccactgtgcagcgctggcatgcacctcttggtgggtgctaacatcacctttggaggggagcctaagcctcactctgtggcccagttggatgcatggcagcaactccagactttcttccacaaacagttgagtggtaagagttaggaggtgccccctaaaatataacctgttatgtggtggtttggggaaaaacccaaatatcagaatgccacttcagtttagttcatttgaacacatactaatttttttaagtttctttcttccttcctttctttctttctgttttttttttttgttgttgttgttgttgtttgtttgtttgtttgagacagggtttgtctgtttacccctggctggcctggaacttgctttgtagaccagaggctaggcctg

SEQ ID NO: 3496 - DNA, 342 bp, Rattus norvegicus
  Genbank Accession No. Y13336
atgtcggcgtcggtagtgtccgtcatctcccggttcctggaggagtacttgagctccactccacagcggctgaagttgctggatgcctatctcctttatatattgctgaccggggcgctgcagttcggctactgtctcctcgtgggcaccttccccttcaactctttcctctctggcttcatctcttgtgtgggcagcttcatcttagcggtttgcttgagaatacagatcaacccccagaacaaggcggatttccaaggcatctctcctgagcgagcctttgctgattttctctttgccagcactatcctgcacctcgtcgtcatgaactttgttggctga

SEQ ID NO: 3497 - DNA, 2021 bp, Rattus norvegicus
  Genbank Accession No. Y18965
atgaagctcgctctgcttattctgctactcttgaatcctcacttgagttcttccaagaacacaccagcctcaggtcagcctcaggaggatctggtagagcagaaatgcttactgaaaaactacacgcatcactcctgtgacaaagtcttctgccagccatggcagaaatgtatcgagggaacctgtgcctgcaaactcccttaccagtgcccaaaggccgggaccccggtgtgcgccactaatggaagaggctacccgacatactgtcacctgaagagtttcgaatgtcttcacccggagataaagttctcgaataatggaacatgcacagctgaagaaaagtttaatgtttccttaatttatggaagcacagatacagagggaattgttcaagttaaactcgtggaccaagatgagaaaatgttcatatgtaaaaatagctggagcaccgtggaagccaacgtggcctgcttcgacctcggatttccactgggtgttcgtgacatacaaggaaggtttaatatacctgtaaatcacaaaataaactccaccgaatgcctgcatgtgcgttgccagggagtagagaccagtttggcagagtgtacctttaccaagaagagttcgaaggctccccatggcttggcaggtgtagtgtgctacacacaggatgcagatttcccaacaagtcagtccttccagtgtgtgaatgggaagcgcattcctcaggagaaagcctgtgatggtgtcaacgactgtggagatcaaagtgatgagctgtgttgcaaaggttgccgaggccaagccttcctttgcaagtcgggagtttgcatcccaaaccaacgtaagtgtaacggtgaggtggactgcatcaccggcgaggacgagagtggctgtgaagaagacaaaaagaataaaattcataaaggccttgcacggtcagaccaaggaggagaaactgaaattgagactgaagaaacagaaatgttgactcctgatatggacacagaaagaaaacggataaagtccttattacctaaactatcctgtggagtcaaaagaaatactcacattcgcaggaaaagagtggtcggagggaagccagccgagatgggagattacccatggcaggtggcgattaaggatggagatagaataacctgtgggggcatttatatcggtggctgttggattctgacagctgcacactgtgtcagacccagtagatatcgcaactaccaagtatggacgtctttattagactggctaaagcctaactctcagttggcagttcagggagtgagcagagttgtcgttcatgaaaagtataacggagccacctaccagaatgacatagctttggttgaaatgaaaaaacacccgggcaagaaagaatgtgagctcatcaattctgtccctgcctgtgtcccatggtctccatatctattccaaccgaatgacagatgcatcatttctggatggggtcgagaaaaagataaccaaaaagtctactcactcaggtggggcgaagtcgacctaataggcaactgctcgaggttttacccgggtcgctactatgaaaaagagatgcagtgtgcgggtaccagtgatgggtccattgatgcctgcaaaggagactctggaggccccttggtctgcaaggatgtcaacaatgtcacttatgtttggggcattgtgagctggggagaaaactgtgggaaaccagagttcccaggtgtttacaccagagtggccagctattttgattggattagctactacgtgggaagaccccttgtttctcaatacaatgtctgaagctacgacctccttctttctgcacttcttctttccagggttatactttaattgaaatgaaactgtataattagttctcctcgatgctggcaagaagcaagtcttactggctagttcctaaagtttcttcaaagtttatgccattttagaattctgtcatataatccccaataaatattccagttaagcacacaaaaaaaaaaaaa

SEQ ID NO: 3498 - DNA, 468 bp, Rattus norvegicus
  Genbank Accession No. Z11558
aaaatgagtgagtccttggtggtttgtgatgttgctgaagatttagtggaaaagctgagaaagtttcgttttcgaaaagaaacccacaatgctgctattattatgaagattgacaaggataaacgcttggtggtgctggatgaggagctcgagggtgtctctccagatgaacttaaagatgaactacctgaacggcaacctcgcttcattgtgtatagttataaataccagcacgacgatggccgggtctcctaccctctgtgctttatcttctccagtcctctggggtgcaaacctgagcagcagatgatgtacgctgggagtaagaacaagctggtccagaccgccgaactaaccaaggtatttgaaataagaaacaccgaagacctgactgaagaatggttacgtgagaaacttggatttttccactaatgtgaacttctgtgtttcttaagtatttatgtatta

SEQ ID NO: 3499 - DNA, 1380 bp, Rattus norvegicus
  Genbank Accession No. Z22812
catcatagaaggtgaaagtctgtcctgattgagccttcctcagcagccaagaaactgcaaggtacacgaatgcagagctccaggctccgagggtcctgtgcactctggaagttggtgtggacgatgttcatcttgcttgtgttagtaactggggtttcagctttcaccactccagcagtggtgcacacaggaagggtttctgagtctcccgttacatcagagaagcacccagttcttggagacgattgctggtttcgtggcagagatttcaaatcggaattgaggctggaaggtgagcccgtggtcctgaggtgccccctggtacctcattcagacacctccagcagttcccgcagccttctgacatggagtaaatcggactcttctcagctgatcccaggagatgagccaaggatgtgggtgaaggatgatacgctctgggttctgccagcagttcagcaggactctggtacctacatctgcacattcagaaacgcgtcccactgtgaacaaatgtctctggaactcaaggtctttaagaataccgaagcctctttccctctcgtctcctacttgcaaatctcagctctctcctccaccgggttacttgtgtgccctgacctgaaagagttcatctccagcagaactgatggaaagatacagtggtataagggctccatcctcttggataaaggcaataagaaatttctgagtgcgggagaccccacacgcctattgatatccaacacatccatgggagatgcaggctattacagatgtgttatgacatttacctacgagggcaaggaatacaacatcactaggaatattgaactccgggtcaaaggaataaccacagaacccatccctgtgatcatttctcccctggagacaataccagcatctttggggtcaagactgatagtcccgtgcaaggtgttcctgggaactggtacatcttccaacaccatcgtgtggtggatggctaacagcacgtttatctcagtggcctacccaagaggccgtgtgactgaggggctacaccaccagtactcagagaatgatgagaactacgtggaagtgtcgctgatttttgatccagtcacaaaggaggatctaaatacagattttaaatgtgttgccacgaatccacggagttttcagtcactccataccacagtcaaagaagtttcttccacgttctcctggggcatcgcgctggcacctctgtctctgatcatcttggttgtgggggcgatatggattcgcagaaggtgtaaacgccaggctggaaagacgtatgggctgaccaagctaccgactgacaaccaggacttcccttccagcccaaaccaaataaaggaaatgaaataataaaaa

SEQ ID NO: 3500 - DNA, 1483 bp, Rattus norvegicus
  Genbank Accession No. Z27087
ggaagaacagccacaacttacgacactgatctgaccaacttgtgttggccaggaaactcagaaccgctcataactacagcagaccatgaagaaccctggctcacaagccctctttcctttacatcttccctggaaagccagcctggcagatgggaatccactcctgaaagtagtcatattttcatgcctcttgacctttggacgtgggaagttggagcaacctgaaatatcaatatccagagccagagatgagactgctgaaatatcctgtaaaggttttgttgaaagctttcaaagtgtagccatacactggtaccggcagaaaccaaaccaaggtttagagtttctattatatgtcctcgcaactcctactgagactttcttaaataagaagtacaaaaaaatgaaggcaagtaaaaattctagtgcttctacgtcgatattgacaatatattccttggaggaagaagacgaagctatctactactgttcctacggctatagctcgggctggagcaaagtatttgcagaaggaactaaactcatagtagttcctgctgacaaaagctttaatgcagacatttcccccaagcccaccatttttcttccttcttctgctgaaacaaatctccacaagactgggacatacctttgcctccttgaaaagttcttccccgatgtcataagggtgtattggaaagaaaaggacagcaatacgatcctggactcccaggaaggggagacgctgaagactaacgatacatacatgaagtttagctggcttactgtgcctgaagggtcaatgggtaaagagcacagatgtattgtcaaacacgagaacaacaaaggaggagcagaccaagagattttctttccttcaataaagaaagttgctctgagtacccagcctacaacttgctggcaagataaaaacgatgtgctgcagctccagttcacgggcacctctgcctactatacttacctgctcctgctcctcaagagcgtgctctacttggccatcatcagcttctttctgcttagaagaacagcttcctgtggcaataagaagagatcctaaggaaataaacggtggaccagcaagtccattgattttcatccttactgtcataaaggtgacttatgggggtccagctgccttctcttgctggctttgacttctgtaaagtcacatgcacagcattctgttattgtgcaaacatttttctcacatttgtaagcaatttcagcaacttctctctaactgagctcaccttcctgattccatcctctccagcagtcccctcccccagaagcccaaagtatcaaagctctggtacgcataggctgcaggatttcccttgttgctcttgaaccagtcaactctctgaaagcctccgctctagacaacctgaagagccttctttattgttggattctgtgccttgtatttcatattagagacaataaatattttttaaaaatc

SEQ ID NO: 3501 - DNA, 1046 bp, Rattus norvegicus
  Genbank Accession No. Z29530
acgagggcaatccctgacgcaccgccgtgatgcccagggaagacagggcgacctggaagtccaactacttccttaagatcatccaacttttggatgactacccaaaatgcttcattgtgggagcagacaatgtgggctccaagcagatgcagcagatccgcatgtccctccgcgggaaggctgtggtgctgatgggcaagaacaccatgatgcgcaaggccatccggggccacctggagaacaaccccgctctggagaagctgctgcctcacatccgggggaacgtgggctttgtgttcaccaaggaggacctcaccgagattagggacatgctgctggccaataaggtgccagctgctgcccgagccggtgccatcgccccgtgtgaggtcacagtacctgctcagaacaccggtctggggcccgagaagacctctttcttccaagctttgggcatcaccactaaaatctccagaggtaccattgaaatcctgagcgatgtgcagctgataaagactggagacaaggtgggagccagcgaagccacactgctgaacatgttgaacatctcccccttctccttcgggctgatcatccagcaggtgtttgacaatggcagcatctacagcccagaggtgctggacatcacagagcaggccctgcacactcgcttcctagagggtgtccgcaatgtggccagcgtctgtctgcagattggctacccgactgttgcctcagtgcctcactccatcatcaatggatacaaaagggtcctggctttgtctgtggagactgactacaccttcccactggctgaaaaggtcaaggccttcctggccgatccatctgcatttgcggctgcggcccctgtggctgctgccaccactgctgctcctgcagctgctgctgccccagccaaggtcgaagcaaaggaagagtcggaggaatccgatgaggacatgggattcggtctcttcgactaagcccctcacaccaagtcagcctgcttaatttgagaaagatggaaataaaggcttacttctctt

SEQ ID NO: 3502 - DNA, 628 bp, Rattus norvegicus
  Genbank Accession No. Z36980
tgaattcctggaacctcaactggctcccactgctctctcggtgcagttaccgtttggcgatccctctcctgctaacatgccgttcgttgagttggaaacaaacttgccggctagccgcatacccgcagggctggagaaccggttgtgtgcggccacagccaccatcctggacaaacccgaagaccgcgtgagcgtgacgatacgaccgggcatgaccttgttgatgaacaaatccacagagccctgcgcccacctcctgatctcttccatcggtgttgtgggcaccgcggagcagaaccgcagccacagctccagcttcttcaagttcctcaccgaggagctgtccctggaccaggacaggatcattatccgattcttccccttggagccctggcagatcggaaagaaaggaactgttatgacgtttctgtgatggagacaaggaacgcagggcgtttgcttgagcctgtccagagcccttccagagaggcctcctggcagatacgataccagatccctcttttgcataagtgtctgtgatctcactgacctgttttcctctcccccagcctcgtgaacgagagagcaataaagaagagagcataatcccaaaaaaaaaaaaaaaaaa

SEQ ID NO: 3503 - DNA, 1091 bp, Rattus norvegicus
  Genbank Accession No. Z50052
attcgcatttctagaaactgggaaatttcttaagattttaattctggcagctctttaattgtctctttgtggttgcaaatccactggatacactgtcttatttctgctattcttctctattacagggtagactttctttttcccatctgttacaggggaaatataattccttagaaggaagttgttttgatctgacgtctttagaggatgcttttgactgatatcagagtttaagtccatcgtgggtcaagtaactggtcaccaaatgctttgtttggttgtgtgctgtctgatatggttgatttctgccttagatgggagctgttcagaaccccctccggtgaacaatagtgtgtttgttggaaaggaaactgaagaacagattctgggaatttacctttgtatcaaaggctaccacttggtgggaaagaagtctttggtctttgatccctcgaaggaatggaattcgaccctccctgagtgcctcctgggccactgtcctgaccctgtactggaaaatggcaagatcaattcttctgggcctgtgaatataagtggcaaaatcatgtttgagtgtaatgatggttacatcctcaagggaagcaattggagccagtgcctagaggaccacacctgggcacctcccttgcccatctgccgaagtagagactgtgaacctcctgagactcctgtccatggctattttgaaggagaaactttcacttcaggatctgtcgttacttattactgtgaagatgggtaccacctagtgggcacacagaaggtgcagtgcagtgatggagagtggagcccgtcctatcctacctgtgagtccatccaggaaccccccaaatcagctgaacagagtgcacttgagaaagctattcttgcctttcaggagagtaaggacctttgcaatgctacagagaactttgtgagacagctaagggaaggtggaataacaatggaagaacttaaatgttctctggagatgaagaaaactaagctgaagtcggatattttactgaactaccatagctaagcagaatggttacagacagacacctatgaataaattgcttctaaaggtg

SEQ ID NO: 3504 - DNA, 707 bp, Rattus norvegicus
  Genbank Accession No. Z75029
gctctgggtcggggcccaccatcgaggaggtggattagaggctctttctggcgctccaggtgtgatctaggagacagatgggtggccttgaggactttgggttattgtcgtttaggacattaactccttcgttcggtctgcaatcaagtcctaggtttaagcaaactgccttccatttactctgtggaatttcacgtgtgctttgcattcccagtaaattagtactgggagtgtgtctttgcaatagatataatttcctgccttcaagtcagcactgccccccccccgaagttatttctttgcaggacagtcagagctatattgatatagcaagaggtgtgttacaaaaacaccaggacactgttgagttcctttgtgtttggactctcccctgggcgacagtgttgaggcactgttaagtcaggagctcggggccaccggtggatcactgaaagctgagactctgttgcttctcccgtttgacactctgttgctttccttgcatggtggctcacctaaggctgagactcttgttctccttccctgtataatcttgcctggcgttgcacttgttccccagtgtgtgaactcggagatgagtttacaccaccactgttagttcacgttttttgtttttacataaccatcctgaactcaggtcaatttttagctggctatttgaaaataaacttcaaaagaacttgcca

SEQ ID NO: 3505 - DNA, 876 bp, Rattus norvegicus
  Genbank Accession No. AF439403
atggcttcgctcacggtgaaggcctatctactgggcaaggaggaggcggcccgcgagatccgccgcttcagcttctgcttcagcccggagccggaggcggaagccgcggctggcccggggccctgcgagaggctgctgagccgggtggctgtgctgttccccgcgctgcggcctggaggctttcaggcgcactaccgcgatgaggatggggacttggtcgccttctccagtgatgaggaactgacaatggccatgtcctatgtgaaagatgacatcttccgcatctacattaaagagaagaaggagtgccggcgggaacatcgccccccatgtgctcaggaggcacgaagcatggtgcaccccaacgtgatttgtgatggttgcaatgggcctgtggtgggaactcgctataagtgcagtgtgtgccccgactacgacctgtgcagcgtctgcgaggggaagggcctgcacagggagcacagcaagctcatctttcccaacccctttggccacctctctgatagcttctctcatagccgctggcttcggaagctgaaacatgggcactttggctggcctggctgggagatgggcccaccagggaactggagcccacgtcctcctcgcgcaggggatggtcgcccttgccccacagctgagtcgggtaaggctggtgtttgcactggctttaagtgtcataagtagccagcttgttcaggtggacccttggcctaaagtccagaagttcctacaatcagctgtacattacacatccgtttaatttttttggtctttgggggtatggaggttgaacctagggccttgcacataataaataagggctcctttgttgtgctaaaaaaaaaaaaaaaaaaa

SEQ ID NO: 3506 - DNA, 657 bp, Rattus norvegicus
  Genbank Accession No. BE109565
cggccgcaaagacctccgggactcacgcgcaatgtggcaatggaaggctcagggtctgagtccccggcagcggccacggccgcagcacccgcagcgcccgccgtgtgagcggcagcagcgggtctgtcacccggagccggagtccccggccgccagcagcgtcctcgcgagccgagcgcccaggcgcgcccggagcccgcggcggcggcggcaacatggcctcggctggtaacgccgccggggccctgggcaggcaggccggcggcgggaggcgcagacggaccgggggaccgcaccgcgccgcgccggaccgggactatctgcaccggcccagctactgcgacgccgccttcgctctggagcagatttccaaggggaaggctactggccggaaagcgccgctgtggctgagagcgaagtttcaaagactcttatttaaactgggttgttacattcaaaagaactgcggcaagtttttgggtgtgggtctcctcatatttggggccttcgctgtgggattaaaggcagctaatctcgagaccaacgtggaggagctgtgggtggaagttggtggacgagtgagtcgagaattaaattatacccgccagaagataggagaagaggctatgtttaatcctcaactcatgattcagactc

SEQ ID NO: 3507 - DNA, 637 bp, Rattus norvegicus
  Genbank Accession No. BE109647
tttttttttttttttttaatgacaattaatttattggtggattgaggaatacaattttaatgggacaataaggcacaactgtggataaaaacagtttgctatacagccaaggggggcataatcttagaaactttaaataattaaatcaagatgcttctgaagtacttctcaaacagataagtatcagacaattattccctttatacaattcttatatcacatcatttgatcacaaagtctgacatatttcataaagaattccccagttcatgtagaccctagccatctgtcctagccacgcccccactgctcgcctttacccatctcgtctgcagtgtttttgtttgtttgggttaacagcaatttatttcctaaagaattgcttacatatcttggatagccttccaaagcaacaaagcaagcaagcaagcaggcaacaccagagaaagccagccaagagcagattcacaggaacacagggcggaagcagcttgattcagtgacatctaaatcaagctgacattggcagagaatgtcacctcagttggtgccaccagtcccaggtcccatgcttctgagggatctgcatagtatagtattcacaaggagctaggaaggtcgtgtcatcctcgtgccg

SEQ ID NO: 3508 - DNA, 792 bp, Rattus norvegicus
  Genbank Accession No. CA945799
ttttttttttttttttttaaaaggaaaacatatggcttaataagaaagtaatggattcaccttctagggataactgcagaggtctgcagacaaaccaaagacaaagtggagaggccatggagccaccctccccactctgaactgggacaactctgtaggtcagggtcagcctcctgcttggggcagcagaaggctctgcagaaatagttctctttcagggtcataatggctcttagaacacttgttctgttgtgctgtaacaataaaaccctgtttactgtctcctgtcctcttgcaaaacagttgttgtcctcaaggcctccaggagctggcaggaggccctcagtcctcttctgagagctgaagatcctctagctcatcctgtggtccctgagccagctgccacagttcactcagatccacccctgtgtctgtgtctccatcctctgaactgctgtcactatcttccttatgttcttcctcctgacctccttctttcattcctctgtgagattccaggagcccaggaactcctctctcaaagaagtctgtgctgtcctctccctcagaactgtccaactcaaacaggtcttttaattctttcctgtcttcatccttcctgtcttctactttccgccttttgatctctgggaagttcaagtcttctagccgctctttgccactgatctccagctggatctcacggtccctcagcttcttccagtggctgtagtatctggtgagaagggtccctcttcacggacctttctctccagcatcactgcagctgtc

SEQ ID NO: 3509 - DNA, 783 bp, Rattus norvegicus
  Genbank Accession No. CA945852
  misc_feature (1)..(783): n = a or c or g or t
ttttttttttttttttttcacttttccgcatactttatttgttacaaacatacaatttcttaaatatagactgtaaaactccatttgcaaaagtctgctattggaaggagtgcacaccagcaggaaggattcttaaactttttatttctatgagtttttctgtcagttttgctagttagtggtaaatacgggacccgccattttacagacctgtctgaagcttctggctgtattcacattgctctttgaagcagccctgcttgtctcacaattcatcagaatctgagcttcaacctacaggcagtgagatcaccagcccgtctggactctgctttgaacggttttcaggaagtgtggtttctggatgggtactgcacttcatggatttgtttgaattgcccatgcagctgtgtttgttaaagtgcatacttcttttaaaaaataagaggaataatctttactctttaaccaaggtacttaaaaaaatgaactttttggtctctcagcagatatttcccaaattgattctatcgctacaaattttagtgttctatttacaaacgtttatagggttctgggtggaggggaccttataaaatcaaaggtgcagcttcacttgaagcagaaaccagctctacaaaccacacacaggcacacacactnggtttacggtgcataacaagcatgttggtatttacacagagactaaagacattcccaaaccctctctaaactccaactaagctaattgtacatctagaccaggaagctgtctcctgctat

SEQ ID NO: 3510 - DNA, 2383 bp, Rattus norvegicus
  Genbank Accession No. NM_013083
ctctgtgagacacctgaccgaccgctgagcgactgactggtccacagcgccggcaagatgaagttcactgtggtggcggcggcgctgctgctgctgtgtgcggtgcgggcggaggaggaggacaagaaggaggatgtaggcacggtggttggcatcgacttggggaccacctattcctgcgtcggtgtattcaagaacggccgcgtggagatcatagccaacgatcagggcaaccgcatcacaccgtcgtatgtggccttcactcctgaaggggagcgtctgattggcgatgcggccaagaaccaactcacgtccaacccggagaacaccgtcttcgacgccaagcgcctcatcggacgcacttggaatgacccttccgtgcagcaggacatcaagttcttgccattcaaggtggttgaaaagaaaactaaaccatatattcaagttgatatcggaggtgggcaaaccaagacatttgccccagaagaaatttctgctatggttctcactaaaatgaaggaaactgccgaggcgtatttgggaaagaaggtcacccatgcagttgtgactgtaccagcttacttcaatgatgcacagcggcaagcaaccaaggatgctggcactattgctggactgaatgtcatgaggatcatcaatgagccaacagcagctgctattgcatatggcctggataagagagagggagagaagaacatcctcgtgtttgacctgggtggtggaaccttcgatgtgtctcttctcaccattgacaatggtgtctttgaagtggtggccactaatggagacactcatctgggtggggaagactttgatcagcgggtcatggagcacttcatcaagctgtacaaaaagaagactgggaaagatgtcagaaaggacaacagagctgtgcagaaactccggcgtgaggtagaaaaggccaagagagccctgtcttctcagcatcaagcgaggattgaaattgagtccttcttcgaaggagaagacttctcagagacccttactcgggccaaatttgaagagctgaacatggacctgttccgctctaccatgaaacctgtccagaaagtgttggaagactctgatctgaagaaatctgatattgatgagattgttctggttggcggatctactcgaattccaaagattcagcagttggtgaaagagttcttcaatggcaaggagccgtcccgtggcatcaacccagatgaggctgtagcatatggtgccgctgtccaggctggtgtcctctctggtgatcaagatacaggtgacctggttctgcttgatgtgtgtcctcttacacttggtattgaaactgtgggaggtgtcatgacaaaactgattccgaggaacactgtggtgcccaccaagaagtctcagatcttctccacagcttctgataatcagcccaccgtaacaatcaaggtctacgaaggtgaacgacccctgacaaaagacaatcaccttctgggtacatttgatctgactggaatccctcctgctccccgtggggtaccccagattgaagtcacctttgagatagatgtgaatggtattcttcgagtgacagctgaagacaaagggacaggaaacaaaaacaaaatcaccatcaccaatgaccaaaaccgcctgacccctgaagaaattgaaaggatggtcaatgacgccgagaagtttgctgaggaagacaaaaagctcaaagagcgcattgacacgaggaatgaattggaaagctatgcttactctcttaagaaccagatcggagataaagagaagctgggaggtaagctgtctcctgaagataaagagaccatggagaaagctgtagaggaaaagatcgaatggctggaaagccaccaggatgcagacattgaagactttaaagctaaaaagaaggaactagaagaaattgttcagccaattatcagcaaactctatggaagtggaggccctcccccaactggtgaagaggatacatcagaaaaagatgagttgtaggtgcactgatctgctagagctgtaatattgtaaatactggactcaggaactttcgttgggagaaaattgagagaacttaagtctcgaatgtaattggaatcttcacctcagagtggagttgaaaatgctatagcccaagtggctgtttactgcttttcattagcagttgctcacgtgtcttggggtcagggagaggaggaattggctattttaaaattggggaaaagctgggtcagggtgtgtgttcaccttggatatgttctatttaacggttgggtcatgcacatctggtgtaggaacttttttctaccataagtgacaccaataaatgtttgttatttacactggtctagtttttgtg

SEQ ID NO: 3511 - DNA, 3300 bp, Rattus norvegicus
  Genbank Accession No. NM_053890
cggtcgcacaccccccggtgtcccctcgcctccctcgccgccgcccccttcccccgctcgcgataagaagagccggcggcaggagaggggatgaagatggcggacgcgaagcagaagcggaacgagcagctgaagcgctggatcggctccgagacggacctcgagcctcccgtggtgaagcgccagaagaccaaggtgaagttcgacgatggcgccgtcttcctcgccgcctgctccagcggcgacacggacgaggtcctcaagctgctgcaccgcggcgccgacatcaattacgccaatgtggacggactcaccgccctgcaccaggcttgcattgatgacaatgttgatatggtgaagtttctggtagaaaatggagcaaatatcaatcaacctgacaatgaaggctggattccactccatgcagccgcttcctgtggatatctggatattgcagaatttttgattggtcaaggagcacatgtaggagctgtcaacagtgaaggtgacacacctttagatattgcagaggaggaagcaatggaagagctacttcaaaatgaggttaatcggcaaggtgttgatatagaagcagctcgaaaagaagaggaacgcataatgcttagagacgcgaggcagtggttgaacagtggtcacatcagtgacgtccggcatgcaaagtccggaggcacagcactccacgtggcagcggccaaagggtatacagaagttttaaaacttttaatacaggcaggctatgatgttaatattaaagattatgatggctggacacctcttcatgctgcagctcactggggtaaagaagaagcatgtcggattttagtggacaatctgtgtgatatggagacggtcaacaaagtgggccaaacagcctttgatgtagcagatgaagacattttgggatatctagaggagttgcaaaaaaaacaaaatctgctccatagtgaaaagcgggataagaaatctccactgattgaatcaacagcaaatatggaaaataatcaaccacagaagacttttaaaaacaaggaaacgttgattattgagccagagaaaaatgcatctcgaatcgagtctctggagcaagaaaaggctgatgaggaggaggaaggcaagaaggatgagtccagctgctccagtgaggaggatgaggaggatgactccgagtccgaagcggagacagataagacaaaacccatggcttctgtaactaatgctcacactgccagcactcaggcagctcctgccgctgtgacaacacctactctgtcttccaaccaggggacccctacatcacctgttaaaaagtttcctacatcaactacaaaaatttctcccaaagaagaagaaagaaaagatgaatctcctgcatcctggaggttaggacttagaaagactggcagttatggtgccctggctgagatcactgcatctaaagaagctcagaaggagaaagacactgcaggcgtgatacgttcagcttcgagtcccagactctcgtcctctttggataataaagaaaaggagaaagacaataaaggaacaagacttgcatatgtcgcccctacaatcccaaggcgactaggcagtacgtctgacattgaagagaaggaaaacagagagtcttcaaatttgcgaacaagtagttcttacacaagaagaaaatgggaagatgatcttaaaaaaaatagttcaatcaatgaaggatctacttaccatagaagtacctcaaatcgtttgtgggctgaggatagtactgagaaagagaaggacagtgctcctaccgcagcgaccattcttgttgctccaactgttgtaagtgctgcagcttcttctaccacagccctgaccacaactactgctggcactctttcctccacatcagaggtcagggagagacgcaggtcatacctcactcctgttagggatgaagagtctgaatcccaaaggaaagcaagatctagacaagcaagacagtctagacggtcaacacagggggtgacactgactgacctccaggaagccgaaaagacaataggaagaagccgttctacgagaaccagagaacaagaaaacgaagaaaaagacaaagaagaaaaggaaaagcaggataaagagaaacaagaagaaaagaaggagtcagaagtatctagagaagatgaatataagcaaaagtattccagaacatacgatgagacttatgcacgttacagaccagtgtcaacttcaagttcaagcactccgtcgtcctcctcactttctactctaggcagttcactctatgcctcaagtcagctcaacaggccaaacagccttgtaggtataacctctgcctactcccggggattaaccaaagacaatgaaagagagggagagaaaaaagaagaggaaaaagaaggggaagataagtcacaacctaaatcaatcagagaacgacggcgaccaagagaaaaacggaggtctactggagtctccttctggacacaagatagtgatgaaaatgagcaagagcggcagtcagacaccgaggatggctccagcaagagggacactcagacggattctgtttccaggtatgacagcagttccacgtcatcaagcgatcggtatgactccttgctgggtcgttctgcctcatacagttacttagaagaaaggaaaccatatggtagccgactagaaaaggatgactcaactgacttcaaaaagctttatgaacaaatcttagctgaaaatgaaaaactaaaggcacagctacatgacacaaatatggaactaacggatctaaagttgcagttggaaaaagctacccagagacaagaacgatttgctgacaggtcactattggagatggaaaaaagggaacgaagagctctagaaagaagaatatctgagatggaagaggagctcaaaatgttaccagacttaaaagcagacaaccagaggctaaaggatgaaaatggggccttgatcagagttataagcaaactttccaagtaggacagaaaacacacaagcgaagcagcgggacttgcacacactccccagtggaccacattggcagtcactggacgccagaaagaacccctggagactgtcattttccgatatcctgccaaacgccctcttatctaggagttttgtttcgtttaatcttctgccccacccccttggttatcaagaccattgtttcatgttaaagccgctgctgagaagattttttttcaatgactgagaaaacttgtttacagctccagcaaataaagaaagtgttcaagg

SEQ ID NO: 3512 - DNA, 1047 bp, Rattus norvegicus
  Genbank Accession No. NM_172017
tttgggcaggacaaggcaagagaagcggctgtttcagtagtgtttgtacccagaactcagcgaggtctacccttgggtagagcgaacgtccggccatggcttaccactcgggatatggagtccacggttccaagcataggacccgggcagctccaaaccctcctccactcttcgatgatacaagtggtggttattccagccaactaggcggatacccagccccaggagctgatgtagccttcaatgtcaacaacctgcttggagacccagtggccaatatggctatggcccatggcagctccatagcatcccaagggaaggacatagtgcacaaagagctacaccgttttgtgtctataaacaaactcaagtatttttttgctgtggacacagcctatgtagccaagaagctagggctattggtcttcccttacacacatcagaactggaaagtgcagtacagtcatgatgtgcctcttgcccccacggaaagacctcaatgcgcctgacctctatatccccaccatggccttcataacatacgtgctgctggctgggatggcactaggcattcagaaaaggttctccccacagcatgtggggctttgtgagcgagacaggtactggtgtgggtgttaatggagtgttggctctgcttctggcctctacctggccaccgtacgcagtgaactgggcaccttccacctcttggcctagactggctacaagtatgtagggatgatcctcagtgtgctcacagggctagcttttcggcagtgatggctactacgtggccctggcctggacatcgtctgcactcatgtacttcactgtagatctttgcggactgcagcttgggtcctgacagcatggggggcccacccctcggcagcatctccagctgtacctgaccctgggagccgctgcctccaaccccttatgatatactggctgaccttccacctggtccggtgacccctggtcctttggtggcactgagttttccatacattgaagatttggtttccttaaaaaaaaaaaaaaaaa

SEQ ID NO: 3513 - DNA, 1827 bp, Rattus norvegicus
  Genbank Accession No. NM_172320
atgagacacttaaaacttacaggttttatttttttcctgttgtctttgactgaatccctagccctacccacaaagcctcaggatgtagatcatttcaatgctactcagaaattcataaatgagaacgttgcatacctgaccatcattgcatctgcccagtatgttcaggaagcatcctttgaggaggtggaaatgctggtgaaggtcatgctggattacaaggataggtgcttggctgacagcacacttccggagtgttcaaagatagctaatgatgctatccaggacatgctctgtgatatgaaggggctgccacagaagcataacttctcccattgctgtaggcaagccggctttcaaagaagactctgcttcttctacaacaagaaagctaatgtaggatttctgccccctttccctactctggatccagaagagaaatgccaagcttataaaaataacagtgaatcttttctcaacctctatatgtatgaggtggccagaaggaacccctttgccttcgccccagttcttctgaacgttgccgctaggtttgaggaggcggcgaccacgtgctgtgaacagcaacagaaagccacctactttcaagacaaggcagcccccatcacacagtatttaaaagcgttatcttcttatcaaagaaatgtttgtggagcccttttaaaatttggacccaagaccttaaactctataaacatcgccgtgtttagtaagaagttccccaagattggatttgaagaccttacgtccctcttagaagatgtttcttccatgtatgacgggtgctgtgaaggggacgtcgtgcagtgcatccggagccagagccaggttatgcaccatatttgttcaaaacaagactccatctcaagtaagatcaaagcgtgctgtgagaagaaactgccagagcgcgcagactgcataatcaacgcaaacaaggatgacagaccagaagacttatctctgagaacacccaaatttaccgacagtgaaaatgtgtgccaagagcgagattccgagcaggacaagttctttgctgagtttctttatgattactccagaagacatactgaactgtctacaccagagctcctaagaattactaaagtgtataaggatctcctggaagattgctgcaacagaaaaaacccgttaagctgttaccgccatgcggaggataagttcaacgagacaacagagcgaagccttgcgatggtccagcaagagtgcaaacagttccaggaattggggaaggacgctctacaacgccatttccttgtcaagttcaccaaggcagcccctcaactccccatggaagaactggtctcccttagtaaggaaatggtggcggctttggcaacctgctgcactctcagtgacgagttcgcctgtgtggacaacttggcagatttagttcttggagaattatgtggaatgaataagaatcgaactatcaatcccactgtggatcactgctgcagagctgactttgccttcaggagaccctgctttgagcacctgaaagccgacaccacctatgcactcccatcagtctctgcacttgtatctgctttgcgtgcagactggtgtcagcctctcaaggaggaccttcagaataagagacacaggtttctggtcaacttagtgaagtggatgccagagatcacagatgaggaacgtctgtgtttgttcacaaagttcacggctgctggggaggagtgtggcaacatacagaagcctgaggcctgtttcagtccagagagttcaaaaaccggtgatgtgagtcaagatgcagagaaacaaaggtga

SEQ ID NO: 3514 - DNA, 1994 bp, Rattus norvegicus
  Genbank Accession No. NM_173094
atctctcccaggggctgtggactgctggctttctgttgataccttagagatgcagcggcttttggctccagcaaggcgggtcctgcaagtgaagagagtcatgcaggaatcttcgctctcacccgctcacctgctccccgcagcccagcagaggttttctacaatccctcctgctcccctggccaaaactgatacatggccaaaagatgtgggcatccttgccctggaggtctactttccagcccaatatgtggaccaaactgacctggagaagttcaacaatgtggaagcagggaagtacacagtgggcttgggccagacccgtatgggcttctgttcggtccaggaggacatcaactccttgtgcctcacagtggtgcagaggctgatggaacgcacaaagctgccatgggatgccgtaggccgcctggaagtgggcacggaaaccatcattgacaagtccaaggctgtcaagacagtgctcatggagctcttccaggattcaggcaacactgacatcgagggcatagataccaccaacgcctgctatggtggcactgcctccctcttcaacgctgccaactggatggagtccagctactgggatggtcgctatgccctggtggtctgtggtgatatcgcagtctacccaagtggtaacccccgccccacaggtggtgccggggctgtggcaatgctgattgggcccaaggccccgctagtcctggaacaagggctgaggggaacccacatggagaacgcctatgacttctacaaaccaaacttggcctcagagtatccactggtggatgggaagctgtctatccagtgctacctgcgggccttggaccgatgctatgcagcttaccgcaggaaaatccagaatcagtggaagcaagctggaaacaaccagcctttcaccctcgatgacgtgcaatatatgatcttccacacacccttttgcaagatggtccagaaatccctagctcggctgatgttcaatgacttcctgtcatctagcagtgacaagcagaacaacttatacaagggtctagaggccttcaagggtctaaagctggaagaaacctacaccaacaaggatgttgacaaggctctgctgaaggcctccctggacatgttcaacaagaaaaccaaggcctccctttacctctccacaaacaatgggaacatgtacacctcgtccctctacgggtgcctggcctcacttctctcccaccactctgcccaagaattggccggctccaggattggagccttctcctacggctcaggcttagcagcaagtttcttctcatttcgagtgtccaaggacgcttccccaggttcccctctggagaagctggtgtctagtgtgtcagatctgcccaaacgtctagactcccggagacgcatgtcccctgaggaattcacagaaataatgaatcagagagagcaattttaccacaaggtgaacttctctccccctggtgacacaagcaacctcttcccaggcacttggtaccttgaacgagtggatgagatgcaccgcagaaaatatgcccggcgtcccgtctaaggagaccaatccatacaaccattccccggggaaagaatgtgagcagagccgttacccaaacggcttccacttaaaattccacccacagcagtgaacggtgaatagacacagcgaccccataggatctgctccgcggtgaagggcctccctctgtggatcctgggtgaccctccctgaagcagtgagcaccacaggttctgctgtggaccagagcccccctgtggagagggagaaagaaaggggagccgctgacctgcagggatacagaccttccccacagcctggcagccgcccgtttgttgcagcttattatcagactgtgggctatcatagttcatgctcgtttcttaaagtttcccgagaatttctaaaattttgtatctaaacttttaatatggcgattaaaaggagagaagga

SEQ ID NO: 3515 - DNA, 571 bp, Rattus norvegicus
  Genbank Accession No. BE099470
tttttttttttttttttaagctacaaagcccctgcgtcatttattgtccccaaatcagcaagaaggtgcccagagcgattccaaggtccacctgctccatcacaccttgtaacagggtggtggtgttccttatgggaggcaggctgacgaagcagcccgaatcagcctggccttgggagtcataagtctgtgggctagtctcaacgaagtctcagtgctgtcctggcccatgcagcctcctagggcctgtgcacttcctccagtcaggttgacatcagagctcacagaaccatatgttctctcttgtccttgcagcctgtcatcaccatctcaacatcatctcaggttcctggtttcaaagacagtctcttcctcgctgtcctgagaggccatctcttcatgctcctctgtgttggtcaggagcccataccttcttcgctgtggcttctttagtctaaaggcccggatgaggaagtaaagcgaaaccaggccgcagagcccagtaattacgtagaacaagcgaagcatcgcggagcccgtgtccgggagactcccgcttgtgcggttttga

SEQ ID NO: 3516 - DNA, 667 bp, Rattus norvegicus
  Genbank Accession No. BE109249
tttttttttttttttttagaaaaataaaggtctaattcactcaaaattcttcagtttttacaaaactaacagggtggagtagggaagggagcagggaggcagccgcaggggtgggtaggcggagaggcaggctatgcttctgtcttcacctgagcctggttgcctgccacattgttcggctcacccttcatctcagcatcagtgggatggtctcctgcagccacttctgtcttggccttatgttcctcctcagccagcctctcaaacatgttggcatagagcttcttttcccgggcaagctgcctgcgggtccgctgctggcacacagccagctgggtcttggcggctttgttgctgggatagagctgcaggaccttttggaagtcagctcgtgccaggtcaaagtcattcacggccaggtgtgcctctccccggcgaaacaggcccttctcattgttgctgtccagctccaaggccttgttacagctttcgatggcagctgagaaggcctgcagtttcaggtgacacatggccagattgagatgtgaggccagtcggagcgcatggaccttttgcatttcctcaccggaaaaactagactcgtattctagccaagacaaatcttcttgtactgcagtaaggctgcttgtacttgccctcgtgccga

SEQ ID NO: 3517 - DNA, 580 bp, Rattus norvegicus
  Genbank Accession No. BE113999
tttttttttttttttttacaggaggaaggaaacatgttttaaagtcagaggacattataagaaaaatttacaaaaccagtaataattatactacattaatacagcattcgaacagggaaggggtaggtgcactttttcaatgcactagcttcaaagtccaaagaaaaggaggcaaagctgcttttcatgaagagcagctacatatttcacataattgttttgaaagaaagcctattaacaacaatgattgtttaatgctagttttacagcaagaggaaactaaaatagcagcaaattcacaaggcaaggcttccacagaatgaccatcccatggtgcacatgatgcctaaagtgctcccagttggatatacaagtataattcacaatagaaaaaaagaaacgttaagattgacacaggtacattggaggctgagtagtactgagtctctgagcatttccctttttgaagggagaggatgatcgcagtaaagccctcgagtcctttccacagtcaaaacaaggaaagacacctttcatcacacggcaacagtgaatgagaagcagcacaccaccacagtgg

SEQ ID NO: 3518 - DNA, 3657 bp, Rattus norvegicus
  Genbank Accession No. NM_012820
ccaacacagaactatggaagtccacgaattgttccggtattttcgaatgccagagctgattgacattcggcagtacgtgcgtacccttccaaccaacacactcatgggcttcggggcttttgcagcgctcaccaccttctggtatgccacccggccgaaggccctgaagccaccatgtgatctgtccatgcagtctgtggaagtaacgggtactactgagggtgtccgaagatcagcagtccttgaggacgacaagctcttgctgtactactacgacgatgtcagaacgatgtacgatggcttccagagggggattcaggtgtcaaatgatggcccttgtttaggttctagaaagccaaaccagccatatgagtggatttcttacaaacaggttgcagaaatggctgagtgcataggctcggcgctgatccagaagggtttcaaaccttgctcagagcagttcatcggcatcttttctcagaacagacctgagtgggtgaccatcgagcaggggtgcttcacttactccatggtggttgttccgctctatgacacgcttggaaccgacgccatcacctacatagtgaacaaagctgaactctctgtgatttttgctgacaagccagaaaaagccaaactcttattagaaggtgtagaaaataagttaacaccatgccttaaaatcatagtcatcatggactcctacgacaatgatctggtggaacgcggccagaagtgtggggtggaaatcatcggcctaaaagctctggaggatcttggaagagtgaacagaacgaaacccaagcctccagaacctgaagatcttgcgataatctgtttcacaagtggaactacaggcaaccccaaaggagcaatggtcacccaccaaaacattatgaacgattgctccggttttataaaagcgacggagagtgcattcatcgcttccccagaggatgttctgatatctttcttgcctctcgcccatatgtttgagaccgttgtagagtgtgtaatgctatgtcatggagctaagataggatttttccaaggagacatcaggctgcttatggatgacctcaaggtgcttcagcctaccatcttccctgtggttccgagactgctaaaccggatgtttgacagaatttttggacaagcaaacacgtcagtgaagcgatggctgttggattttgcctccaaaaggaaagaggcggagcttcgcagtggcatcgtcagaaacaacagcctgtgggataaactcatctttcacaagatacagtcgagcctgggcgggaaagtccggctgatgatcacaggagcagccccagtgtctgccacagtgctgacgtttctgagggcggctctcggctgtcagttctatgaaggctacggacagaccgagtgcaccgctggttgctgcctgagcttgcctggagactggacagcaggccatgttggtgcccccatgccttgcaattatatcaagcttgtagatgtggaagatatgaattaccaggctgccaagggcgagggtgaggtgtgtgtgaaaggggcaaatgtgttcaaaggctacttgaaagacccagcaagaacagctgaagccctagataaagatggttggttacacacgggggacattggaaaatggctgccaaatggcaccttgaagattatcgacaggaaaaagcacatatttaaactagcccaaggagagtacatagctccagaaaagatcgaaaatatctacctgcggagcgaagccgtggcccaggtgtttgtccatggagaaagcttgcaggcctttctcatagccattgtagtacctgatgtggagatcctaccttcctgggcacagaagagaggatttcaagggtcctttgaagaactgtgcaggaacaaggatatcaataaagctatcctggaagacatggtgaaacttgggaagaatgctggtttgaagccatttgaacaggtcaaaggcattgctgtgcacccggaattattttctattgacaatggcctcctgactccaacactgaaggcaaaaaggccagagctgcggaactatttcaggtcacagatagatgaactgtactccaccatcaagatttaacatgaggaagaatccttagaggaaatggcgcacctccacaatcctcctcgtaccaatggcctttgagttggtaactctgcctgcagcgagtgtgggaaaggaaatgccatgctggacttgtgcacagggtcttaccatagggatagcagagggcacggaacactgccttacagtcacctgtgttgtagcccatgatcctggggatacacagtttccaaaacgagccttaaacattgtaaaggggaacccataaaagtgctaagttatttaagacttcaaccaataaggtgggtgttaaaacttctgtctcctgtttttctaaccaaggggttaggacttactctttctgatacgtctgctgctggctgcacaccctgcagccgtctgctgctctgaagagtacagtacactggaagaaagctacccctttaagagcaactgtccaggctgaagaaagtcacagtggaccagagatttctcttcttaaccccttccccttgtccctttccctcaccactcacatgcagtacatttatgtgacccttctggtttgtaagggttccaaagggtccctgttgtgcctgctggtaacctcgtgtttccagtacactaaagaacagatcctcctcagaacaatgcgggtacccagtctcagaaaaggaaaaaaaaaaaaaggtggctcctgcgttgagccagcaacttgcaggctcacacagatgtcctcagactccgctccatctctgctccctgcccctcccattcttcccaggggttatgagaaaccctgccttagactctgcagtgaagatggtgttccgaagaatgacctggatgggccatgctcaactgtgattcctcccccgctgtccactcgctcgctcgtcgtggaaccagcccgtatctgcagcggcctctgtgctccaaatgtggttttctagcaaatgctaatgtggtgatcaacttgctttgttttctttccctcccagttaaactcaggcacagcatgtcttcagaagtatctaggcagttggtatacgtgggtacttattaaagtggacagtaataagtaaatgtccttattataaaactacctgatttatgtgaaatgcatttgataagccaaaaatctggggtgtagaaatctgggggaaaaaaaatcatatcctgggatcaacttcccaaggtatattttttaagttaatttgggaaatgaacagcatttcactttgccgcgagtcttggccacatttgacctatttgagctgtttatacatttgaagccactgttgttggctgtgtgacagtgtgtgtatcttgaagcacaactgggtttgcactaaagaatcatcattgtaataacactatttggtagcctaacttcattttcgtattcttaactgcacaggaagtcgataatttgtcacaacggggttttgaatgtttgctttcagtgttggctatttctatgttttataaaccaaaacagaatttccaaaaacaatgaaggaaaccaaaataaatatttctgcatttggagtgagtgg
